(19) United States
(12) Patent Application Publication
(10) Pub. No.: US 2009/0047216 A1
(43) Pub. Date: Feb. 19, 2009

(54) Tumor vasculature markers and methods of use thereof

(76) Inventors: George Coukos, Yardley, PA (US); Ronald J. Buckanovich, Ann Arbor, MI (US); Phyllis A. Gimotty, Wallingford, PA (US)

Correspondence Address: Pearl Cohen Zedek Latzer, LLP, 1500 Broadway, 12th Floor, New York, NY, 10036, US

(21) Appl. No.: 11/657,719

(22) Filed: Jan. 25, 2007

Related U.S. Application Data
(60) Provisional application No. 60/762,787, filed on Jan. 26, 2006.
(60) Provisional application No. 60/791,212, filed on Apr. 12, 2006.
(60) Provisional application No. 60/844,347, filed on Sep. 14, 2006.

(51) Int. Cl. A61K 49/00; A61B 18/18

(52) U.S. Cl. 424/9.1; 606/13

(57) ABSTRACT

This invention provides methods of detecting and localizing tumor vasculature cells (TVC) and solid tumors; and treating, impeding vascularization of, and determining the stage of solid tumors in a subject, comprising the step of contacting a subject or a TVC with a ligand that binds to a nucleic acid molecule of the present invention, or binds to a protein encoded by the nucleic acid molecule.

### CROSS REFERENCE TO RELATED APPLICATIONS

[0001] This application claims priority of U.S. Provisional Application Ser. No. 60/762,787, filed Jan. 26, 2006, U.S. Provisional Application Ser. No. 60/791,212, filed Apr. 12, 2006, and U.S. Provisional Application Ser. No. 60/844,347, filed Sep. 14, 2006. These applications are hereby incorporated in their entirety by reference herein.

### STATEMENT REGARDING FEDERALLY SPONSORED RESEARCH OR DEVELOPMENT

[0002] The invention described herein was supported in whole or in part by grants from The National Institutes of Health (Grant No. CA098951, P50-CA083638, K12-HD43459, and D43-TW00671). The government has certain rights in the invention.

### FIELD OF INVENTION

[0003] This invention provides methods of detecting and localizing tumor vasculature cells (TVC) and solid tumors; and treating, impeding vascularization of, and determining the stage of solid tumors in a subject, comprising the step of contacting a subject or a TVC with a ligand that binds to a nucleic acid molecule of the present invention, or binds to a protein encoded by the nucleic acid molecule.

### BACKGROUND OF THE INVENTION

[0004] Markers of solid tumors and their vasculature have been difficult to identify because of difficulty in isolating these cells in contaminant-free preparations. Such markers are urgently need for use in a variety of therapeutic and diagnostic applications.

### SUMMARY OF THE INVENTION

[0005] This invention provides methods of detecting and localizing tumor vasculature cells (TVC) and solid tumors; and treating, impeding vascularization of, and determining the stage of solid tumors in a subject, comprising the step of contacting a subject or a TVC with a ligand that binds to a nucleic acid molecule of the present invention, or binds to a protein encoded by the nucleic acid molecule.

[0006] In one embodiment, the present invention provides a method of localizing a solid tumor vasculature in a subject, the method comprising the steps of: (a) contacting the subject with a ligand that binds a DR6-encoding nucleic acid molecule or that binds a DR6 protein; and (b) localizing the ligand, thereby localizing a solid tumor vasculature in a subject. In another embodiment, the solid tumor is an ovarian tumor. In another embodiment, the solid tumor is any other type of solid tumor known in the art. Each possibility represents a separate embodiment of the present invention.

[0007] In another embodiment, the present invention provides a method of localizing a solid tumor vasculature in a subject, the method comprising the steps of: (a) contacting the subject with a ligand that binds an ADAM12-encoding nucleic acid molecule or that binds an ADAM12 protein; and (b) localizing the ligand, thereby localizing a solid tumor vasculature in a subject. In another embodiment, the solid tumor is an ovarian tumor. In another embodiment, the solid tumor is any other type of solid tumor known in the art. In another embodiment, the ADAM12-encoding nucleic acid molecule or ADAM12 protein is a short isoform thereof. In another embodiment, the nucleotide or protein is any other isoform known in the art. Each possibility represents a separate embodiment of the present invention.

[0008] In another embodiment, the present invention provides a method of localizing a solid tumor vasculature in a subject, the method comprising the steps of: (a) contacting the subject with a ligand that binds a long isoform of an ADAM12-encoding nucleic acid molecule or an ADAM12 protein; and (b) localizing the ligand, thereby localizing a solid tumor vasculature in a subject. In another embodiment, the solid tumor is an ovarian tumor. In another embodiment, the solid tumor is any other type of solid tumor known in the art. Each possibility represents a separate embodiment of the present invention.

[0009] In another embodiment, the present invention provides a method of localizing a solid tumor vasculature in a subject, the method comprising the steps of: (a) contacting the subject with a ligand that binds a CDCP1-CUB-encoding nucleic acid molecule or a CDCP1-CUB protein; and (b) localizing the ligand, thereby localizing a solid tumor vasculature in a subject. In another embodiment, the solid tumor is an ovarian tumor. In another embodiment, the solid tumor is any other type of solid tumor known in the art. In another embodiment, the CDCP1-CUB-encoding nucleic acid molecule or CDCP1-CUB protein is a long isoform thereof. In another embodiment, the nucleotide or protein is any other isoform known in the art. Each possibility represents a separate embodiment of the present invention.

[0010] In another embodiment, the present invention provides a method of localizing a solid tumor vasculature in a subject, the method comprising the steps of: (a) contacting the subject with a ligand that binds a short isoform of a CDCP1-CUB-encoding nucleic acid molecule or a CDCP1-CUB protein; and (b) localizing the ligand, thereby localizing a solid tumor vasculature in a subject. In another embodiment, the solid tumor is an ovarian tumor. In another embodiment, the solid tumor is any other type of solid tumor known in the art. Each possibility represents a separate embodiment of the present invention.

[0011] In another embodiment, the present invention provides a method of localizing a solid tumor vasculature in a subject, the method comprising the steps of: (a) contacting the subject with a ligand that binds a SLC11A1-NRAMP-encoding nucleic acid molecule or that binds a SLC11A1-NRAMP protein; and (b) localizing the ligand, thereby localizing a solid tumor vasculature in a subject. In another embodiment, the solid tumor is an ovarian tumor. In another embodiment, the solid tumor is any other type of solid tumor known in the art. Each possibility represents a separate embodiment of the present invention.

[0012] In another embodiment, the present invention provides a method of localizing a solid tumor vasculature in a subject, the method comprising the steps of: (a) contacting the subject with a ligand that binds a BLAME/SLAMF8-encoding nucleic acid molecule or that binds a BLAME/SLAMF8 protein; and (b) localizing the ligand, thereby localizing a solid tumor vasculature in a subject. In another embodiment, the solid tumor is an ovarian tumor. In another embodiment, the solid tumor is any other type of solid tumor known in the art. Each possibility represents a separate embodiment of the present invention.

[0013] In another embodiment, the present invention provides a method of localizing a solid tumor vasculature in a subject, the method comprising the steps of: (a) contacting the subject with a ligand that binds an ESM1-encoding nucleic acid molecule or that binds an ESM1 protein; and (b) localizing the ligand, thereby localizing a solid tumor vasculature in a subject. In another embodiment, the solid tumor is a renal tumor. In another embodiment, the solid tumor is any other type of solid tumor known in the art. Each possibility represents a separate embodiment of the present invention.

[0014] In another embodiment, the present invention provides a method of localizing a solid tumor vasculature in a subject, the method comprising the steps of: (a) contacting the subject with a ligand that binds an EGFL6-encoding nucleic acid molecule or that binds an EGFL6 protein; and (b) localizing the ligand, thereby localizing a solid tumor vasculature in a subject. In another embodiment, the solid tumor is an ovarian tumor. In another embodiment, the solid tumor is any other type of solid tumor known in the art. Each possibility represents a separate embodiment of the present invention.

[0015] In another embodiment, the present invention provides a method of localizing a solid tumor vasculature in a subject, the method comprising the steps of: (a) contacting the subject with a ligand that binds an FZD10-encoding nucleic acid molecule or that binds an FZD10 protein; and (b) localizing the ligand, thereby localizing a solid tumor vasculature in a subject. In another embodiment, the solid tumor is an ovarian tumor. In another embodiment, the solid tumor is any other type of solid tumor known in the art. Each possibility represents a separate embodiment of the present invention.

[0016] In another embodiment, the present invention provides a method of localizing a solid tumor vasculature in a subject, the method comprising the steps of: (a) contacting the subject with a ligand that binds a COL11A1-encoding nucleic acid molecule or that binds a COL11A1 protein; and (b) localizing the ligand, thereby localizing a solid tumor vasculature in a subject. In another embodiment, the solid tumor is a breast cancer tumor. In another embodiment, the solid tumor is any other type of solid tumor known in the art. Each possibility represents a separate embodiment of the present invention.

[0017] In another embodiment, the present invention provides a method of localizing a solid tumor vasculature in a subject, the method comprising the steps of: (a) contacting the subject with a ligand that binds a TNFAIP6-encoding nucleic acid molecule or that binds a TNFAIP6 protein; and (b) localizing the ligand, thereby localizing a solid tumor vasculature in a subject. In another embodiment, the solid tumor is an ovarian tumor. In another embodiment, the solid tumor is any other type of solid tumor known in the art. Each possibility represents a separate embodiment of the present invention.

[0018] In another embodiment, the present invention provides a method of localizing a solid tumor vasculature in a subject, the method comprising the steps of: (a) contacting the subject with a ligand that binds an Adlican-encoding nucleic acid molecule or that binds an Adlican protein; and (b) localizing the ligand, thereby localizing a solid tumor vasculature in a subject. In another embodiment, the solid tumor is an ovarian tumor. In another embodiment, the solid tumor is any other type of solid tumor known in the art. Each possibility represents a separate embodiment of the present invention.

[0019] In another embodiment, the present invention provides a method of localizing a solid tumor vasculature in a subject, the method comprising the steps of: (a) contacting the subject with a ligand that binds a nucleic acid molecule selected from DSG2, c6orf55, SCGB2A1, EPSTI1, SEC23B, MS4A6A, LOC51136, KCNE3, KCNE4, c14orf100, C2orf6, KCNK5, C14orf28, PCDHB2, ST14, OLFML2B, GPR105, SDC1, FLJ46072, IVNS1ABP, SPP1, DKFZp762e1312, WFDC2, KIAA1892, C6orf69, and KIBRA, and (b) localizing the ligand, thereby localizing a solid tumor vasculature in a subject. In another embodiment, the solid tumor is an ovarian tumor. In another embodiment, the solid tumor is any other type of solid tumor known in the art. Each possibility represents a separate embodiment of the present invention.

[0020] In another embodiment, the present invention provides a method of localizing a solid tumor vasculature in a subject, the method comprising the steps of: (a) contacting the subject with a ligand that binds a nucleic acid molecule that encodes a protein selected from DSG2, c6orf55, SCGB2A1, EPSTI1, SEC23B, MS4A6A, LOC51136, KCNE3, KCNE4, c14orf100, C2orf6, KCNK5, C14orf28, PCDHB2, ST14, OLFML2B, GPR105, SDC1, FLJ46072, IVNS1ABP, SPP1, DKFZp762e1312, WFDC2, KIAA1892, C6orf69, and KIBRA, and (b) localizing the ligand, thereby localizing a solid tumor vasculature in a subject. In another embodiment, the solid tumor is an ovarian tumor. In another embodiment, the solid tumor is any other type of solid tumor known in the art. Each possibility represents a separate embodiment of the present invention.

[0021] In another embodiment, the present invention provides a method of localizing a solid tumor vasculature in a subject, the method comprising the steps of: (a) contacting the subject with a ligand that binds a protein selected from DSG2, c6orf55, SCGB2A1, EPSTI1, SEC23B, MS4A6A, LOC51136, KCNE3, KCNE4, c14orf100, C2orf6, KCNK5, C14orf28, PCDHB2, ST14, OLFML2B, GPR105, SDC1, FLJ46072, IVNS1ABP, SPP1, DKFZp762e1312, WFDC2, KIAA1892, C6orf69, and KIBRA, and (b) localizing the ligand, thereby localizing a solid tumor vasculature in a subject. In another embodiment, the solid tumor is an ovarian tumor. In another embodiment, the solid tumor is any other type of solid tumor known in the art. Each possibility represents a separate embodiment of the present invention.

[0022] In another embodiment, the present invention provides a method of treating a solid tumor in a subject, the method comprising the step of contacting the subject with an antibody or ligand that is conjugated to a cytotoxic agent or cytotoxic drug and that binds a nucleic acid molecule selected from DR6, ADAM12, CDCP1-CUB, SLC11A1-NRAMP, BLAME/SLAMF8, EGFL6, FZD10, TNFAIP6, Adlican, DSG2, c6orf55, SCGB2A1, EPSTI1, SEC23B, MS4A6A, LOC51136, KCNE3, KCNE4, c14orf100, C2orf6, KCNK5, C14orf28, PCDHB2, ST14, OLFML2B, GPR105, SDC1, FLJ46072, IVNS1ABP, SPP1, DKFZp762e1312, WFDC2, KIAA1892, C6orf69, and KIBRA, thereby treating a solid tumor in a subject. In another embodiment, the solid tumor is an ovarian tumor. In another embodiment, the solid tumor is any other type of solid tumor known in the art. Each possibility represents a separate embodiment of the present invention.

[0023] In another embodiment, the present invention provides a method of treating a solid tumor in a subject, the method comprising the step of contacting the subject with an antibody or ligand that is conjugated to a cytotoxic agent or cytotoxic drug and that binds a nucleic acid molecule encoding a protein selected from DR6, ADAM12, CDCP1-CUB, SLC11AI-NRAMP, BLAME/SLAMF8, EGFL6, FZD10, TNFAIP6, Adlican, DSG2, c6orf55, SCGB2A1, EPSTI1, SEC23B, MS4A6A, LOC51136, KCNE3, KCNE4, c14orf100, C2orf6, KCNK5, C14orf28, PCDHB2, ST14, OLFML2B, GPR105, SDC1, FLJ46072, IVNS1ABP, SPP1, DKFZp762e1312, WFDC2, KIAA1892, C6orf69, and KIBRA, thereby treating a solid tumor in a subject. In another embodiment, the solid tumor is an ovarian tumor. In another embodiment, the solid tumor is any other type of solid tumor known in the art. Each possibility represents a separate embodiment of the present invention.

[0024] In another embodiment, the present invention provides a method of treating a solid tumor in a subject, the method comprising the step of contacting the subject with an antibody or ligand that is conjugated to a cytotoxic agent or cytotoxic drug and that binds a protein selected from DR6, ADAM12, CDCP1-CUB, SLC11A1-NRAMP, BLAME/SLAMF8, EGFL6, FZD10, TNFAIP6, Adlican, DSG2, c6orf55, SCGB2A1, EPSTI1, SEC23B, MS4A6A, LOC51136, KCNE3, KCNE4, c14orf100, C2orf6, KCNK5, C14orf28, PCDHB2, ST14, OLFML2B, GPR105, SDC1, FLJ46072, IVNS1ABP, SPP1, DKFZp762e1312, WFDC2, KIAA1892, C6orf69, and KIBRA, thereby treating a solid tumor in a subject. In another embodiment, the solid tumor is an ovarian tumor. In another embodiment, the solid tumor is any other type of solid tumor known in the art. Each possibility represents a separate embodiment of the present invention.

[0025] In another embodiment, the present invention provides a method of treating a solid tumor in a subject, the method comprising the step of contacting the subject with an antibody or ligand that is conjugated to a cytotoxic agent or cytotoxic drug and that binds an ESM1-encoding nucleic acid molecule or an ESM1 protein, thereby treating a solid tumor in a subject. In another embodiment, the solid tumor is a renal tumor. In another embodiment, the solid tumor is any other type of solid tumor known in the art. Each possibility represents a separate embodiment of the present invention.

[0026] In another embodiment, the present invention provides a method of treating a solid tumor in a subject, the method comprising the step of contacting the subject with an antibody or ligand that is conjugated to a cytotoxic agent or cytotoxic drug and that binds a COL11A1-encoding nucleic acid molecule or a COL11A1 protein, thereby treating a solid tumor in a subject. In another embodiment, the solid tumor is a breast cancer tumor. In another embodiment, the solid tumor is any other type of solid tumor known in the art. Each possibility represents a separate embodiment of the present invention.

[0027] In another embodiment, the present invention provides a method of impeding a vascularization of a solid tumor in a subject, the method comprising the step of contacting the subject with a ligand capable of inhibiting an activity of a nucleic acid molecule selected from DR6, ADAM12, CDCP1-CUB, SLC11A1-NRAMP, BLAME/SLAMF8, EGFL6, FZD10, TNFAIP6, Adlican, DSG2, c6orf55, SCGB2A1, EPSTI1, SEC23B, MS4A6A, LOC51136, KCNE3, KCNE4, c14orf100, C2orf6, KCNK5, C14orf28, PCDHB2, ST14, OLFML2B, GPR105, SDC1, FLJ46072, IVNS1ABP, SPP1, DKFZp762e1312, WFDC2, KIAA1892, C6orf69, and KIBRA, whereby the ligand is taken up by a vasculature cell of the solid tumor, thereby impeding a vascularization of a solid tumor in a subject. In another embodiment, the solid tumor is an ovarian tumor. In another embodiment, the solid tumor is any other type of solid tumor known in the art. Each possibility represents a separate embodiment of the present invention.

[0028] In another embodiment, the present invention provides a method of impeding a vascularization of a solid tumor in a subject, the method comprising the step of contacting the subject with a ligand capable of inhibiting an activity of a nucleic acid molecule encoding a protein selected from DR6, ADAM12, CDCP1-CUB, SLC11A1-NRAMP, BLAME/SLAMF8, EGFL6, FZD10, TNFAIP6, Adlican, DSG2, c6orf55, SCGB2A1, EPSTI1, SEC23B, MS4A6A, LOC51136, KCNE3, KCNE4, c14orf100, C2orf6, KCNK5, C14orf28, PCDHB2, ST14, OLFML2B, GPR105, SDC1, FLJ46072, IVNS1ABP, SPP1, DKFZp762e1312, WFDC2, KIAA1892, C6orf69, and KIBRA, whereby the ligand is taken up by a vasculature cell of the solid tumor, thereby impeding a vascularization of a solid tumor in a subject. In another embodiment, the solid tumor is an ovarian tumor. In another embodiment, the solid tumor is any other type of solid tumor known in the art. Each possibility represents a separate embodiment of the present invention.

[0029] In another embodiment, the present invention provides a method of impeding a vascularization of a solid tumor in a subject, the method comprising the step of contacting the subject with a ligand capable of inhibiting an activity of a protein selected from DR6, ADAM12, CDCP1-CUB, SLC11A1-NRAMP, BLAME/SLAMF8, EGFL6, FZD10, TNFAIP6, Adlican, DSG2, c6orf55, SCGB2A1, EPSTI1, SEC23B, MS4A6A, LOC51136, KCNE3, KCNE4, c14orf100, C2orf6, KCNK5, C14orf28, PCDHB2, ST14, OLFML2B, GPR105, SDC1, FLJ46072, IVNS1ABP, SPP1, DKFZp762e1312, WFDC2, KIAA1892, C6orf69, and KIBRA, whereby the ligand is taken up by a vasculature cell of the solid tumor, thereby impeding a vascularization of a solid tumor in a subject. In another embodiment, the solid tumor is an ovarian tumor. In another embodiment, the solid tumor is any other type of solid tumor known in the art. Each possibility represents a separate embodiment of the present invention.

[0030] In another embodiment, the present invention provides a method of impeding a vascularization of a solid tumor in a subject, the method comprising the step of contacting the subject with a ligand capable of inhibiting an activity of an ESM1-encoding nucleic acid molecule or an ESM1 protein, whereby the ligand is taken up by a vasculature cell of the solid tumor, thereby impeding a vascularization of a solid tumor in a subject. In another embodiment, the solid tumor is a renal tumor.

[0031] In another embodiment, the solid tumor is any other type of solid tumor known in the art. Each possibility represents a separate embodiment of the present invention.

[0032] In another embodiment, the present invention provides a method of impeding a vascularization of a solid tumor in a subject, the method comprising the step of contacting the subject with a ligand capable of inhibiting an activity of a COL11A1-encoding nucleic acid molecule or a COL11A1 protein, whereby the ligand is taken up by a vasculature cell of the solid tumor, thereby impeding a vascularization of a solid tumor in a subject. In another embodiment, the solid tumor is a breast cancer tumor. In another embodiment, the solid tumor is any other type of solid tumor known in the art. Each possibility represents a separate embodiment of the present invention.

[0033] In another embodiment, the present invention provides a method of detecting a presence of a solid tumor in a subject, the method comprising the step of detecting a presence of an Adlican protein in a body fluid of the subject, whereby the presence in a body fluid of the protein indicates the presence of a solid tumor in the subject. In another embodiment, the solid tumor is an ovarian tumor. In another embodiment, the solid tumor is any other type of solid tumor known in the art. Each possibility represents a separate embodiment of the present invention.

[0034] In another embodiment, the present invention provides a method of detecting a presence of a solid tumor in a subject, the method comprising the step of detecting a presence of an Adlican-encoding nucleotide molecule in a body fluid of the subject, whereby the presence in a body fluid of the nucleotide molecule indicates the presence of a solid tumor in the subject. In another embodiment, the solid tumor is an ovarian tumor. In another embodiment, the solid tumor is any other type of solid tumor known in the art. Each possibility represents a separate embodiment of the present invention.

[0035] In another embodiment, the present invention provides a method of detecting a presence of a solid tumor in a subject, the method comprising the step of detecting a presence of a DR6 protein in a body fluid of the subject, whereby the presence in a body fluid of the protein indicates the presence of a solid tumor in the subject. In another embodiment, the solid tumor is an ovarian tumor. In another embodiment, the solid tumor is any other type of solid tumor known in the art. Each possibility represents a separate embodiment of the present invention.

[0036] In another embodiment, the present invention provides a method of detecting a presence of a solid tumor in a subject, the method comprising the step of detecting a presence of a DR6-encoding nucleotide molecule in a body fluid of the subject, whereby the presence in a body fluid of the nucleotide molecule indicates the presence of a solid tumor in the subject. In another embodiment, the solid tumor is an ovarian tumor. In another embodiment, the solid tumor is any other type of solid tumor known in the art. Each possibility represents a separate embodiment of the present invention.

[0037] In another embodiment, the present invention provides a method of detecting a presence of a solid tumor vasculature cell in a subject, the method comprising the step of detecting a presence, in a body fluid of the subject, of a protein selected from FLJ46072, IVNS1ABP, SPP1, TNPAIP6, DKFZp762e1312, WFDC2, KIAA1892, C6orf69, and KIBRA, whereby the presence in a body fluid of the protein indicates the presence of a solid tumor vasculature cell in the subject. In another embodiment, the solid tumor is an ovarian tumor. In another embodiment, the solid tumor is any other type of solid tumor known in the art. Each possibility represents a separate embodiment of the present invention.

[0038] In another embodiment, the present invention provides a method of detecting a presence of a solid tumor vasculature cell in a subject, the method comprising the step of detecting a presence, in a body fluid of the subject, of a nucleotide molecule that encodes a protein selected from FLJ46072, IVNS1ABP, SPP1, TNPAIP6, DKFZp762e1312, WFDC2, KIAA1892, C6orf69, and KIBRA, whereby the presence in a body fluid of the nucleotide molecule indicates the presence of a solid tumor vasculature cell in the subject. In another embodiment, the solid tumor is an ovarian tumor. In another embodiment, the solid tumor is any other type of solid tumor known in the art. Each possibility represents a separate embodiment of the present invention.

[0039] In another embodiment, the present invention provides a method of detecting a presence of a solid tumor vasculature cell in a subject, the method comprising the step of detecting a presence of a COL11A1 protein in a body fluid of the subject, whereby the presence in a body fluid of the protein indicates the presence of a solid tumor vasculature cell in the subject. In another embodiment, the solid tumor is a breast cancer tumor. In another embodiment, the solid tumor is any other type of solid tumor known in the art. Each possibility represents a separate embodiment of the present invention.

[0040] In another embodiment, the present invention provides a method of detecting a presence of a solid tumor vasculature cell in a subject, the method comprising the step of detecting a presence, in a body fluid of the subject, of a nucleotide molecule encoding a COL11A1 protein, whereby the presence in a body fluid of the nucleotide molecule indicates the presence of a solid tumor vasculature cell in the subject. In another embodiment, the solid tumor is a breast cancer tumor. In another embodiment, the solid tumor is any other type of solid tumor known in the art. Each possibility represents a separate embodiment of the present invention.

[0041] In another embodiment, the present invention provides a peptide having the amino acid sequence CPGAKALSRVREDIVEDE (SEQ ID No: 88).

[0042] In another embodiment, the present invention provides an antibody that recognizes a peptide of the present invention.

[0043] In another embodiment, the present invention provides a method of treating a solid tumor in a subject, the method comprising the steps of localizing the solid tumor by a method of the present invention, and irradiating the solid tumor, thereby treating a solid tumor in a subject. In another embodiment, the solid tumor is an ovarian tumor. In another embodiment, the solid tumor is a breast cancer tumor. In another embodiment, the solid tumor is a renal tumor. In another embodiment, the solid tumor is any other type of solid tumor known in the art. Each possibility represents a separate embodiment of the present invention.

[0044] In another embodiment, the present invention provides a method of treating a solid tumor in a subject, the method comprising the steps of: (a) contacting the subject with a photo-activatable cytotoxic drug or pharmaceutical composition; (b) localizing the solid tumor by a method of the present invention; and (c) contacting the solid tumor with a concentrated light source, thereby treating a solid tumor in a subject. In another embodiment, the solid tumor is an ovarian tumor. In another embodiment, the solid tumor is a breast cancer tumor. In another embodiment, the solid tumor is a renal tumor. In another embodiment, the solid tumor is any other type of solid tumor known in the art. Each possibility represents a separate embodiment of the present invention.

### BRIEF DESCRIPTION OF THE FIGURES

[0045] FIG. 1: A. Immuno-LCM steps. Left panel: Rapid IHC for CD31 allows prompt identification of vasculature in ovarian cancer frozen sections. Middle panel: Tissue section after LCM of CD31⁺ cells. Right panel: captured tumor vascular cells. B. RT-PCR analysis of lineage-specific markers in RNA from tumor vascular cells (TVC) isolated with immuno-LCM, whole tumor (Tum) or a no template control (NTC). C. Scatter plot and correlation value of amplified RNA from unstained tissue (Pre IHC) versus RNA amplified after IHC optimized as in Table 1 (Post IHC). D. Part 1. Heat map condition tree developed using a hierarchical clustering algorithm, excluding all genes where the difference between the means of the tumor and normal vascular samples was less than its standard error. D, part 2: Red color shown alone. D, part 3: Green color shown alone. E. Archived Gene Expression Datasets. Data used for expression of the TVM in normal and tumor tissue samples; also available in the Gene Expression Omnibus (GEO; National Center for Biotechnology Information [NCBI]) with series numbers GSE3526 and GSE2109, respectively. All CEL-files were similarly processed using the Robust Multi-array Average (RMA) algorithm.

[0046] FIG. 2. Quality of total RNA isolated from 8 μm frozen ovarian cancer tissue sections through different methodologies and analyzed by Agilent Bioanalyzer (A-E), quantitative real-time PCR (F) or Affymetrix U133A arrays (G). A. RNA distribution profiles following fixation with different fixatives. (Lanes: 1, ethanol; 2, methanol; 3, acetone; 4, acetic acid+ethanol; 5, paraformaldehyde). B. RNA profiles after isolation without immunostaining (Lane 1) or following IHC with or without RNAse inhibitor. (Lanes: 2, RNA Protector; 3, Placental RNAse inhibitor; 4, SuperRNASin; 5, RNA Protector+SuperRNASin; 6, no RNAse inhibitor. C. RNA profiles after different immunostaining procedures. (Lanes: 1, IHC using DAB; 2, IHC using AEC; 3, immunofluorescence). D. Time course demonstrating RNA stability after IHC performed with procedure optimized as in Table 1. (Lanes: 1, 0 min; 2, 30 min; 3, one hr; 4, two hrs; 5, three hrs). E. RNA profiles following different RNA isolation methods. (Lanes: 1, Arcturus kit; 2, Stratagene kit; 3, modified Trizol; 4, Zymo kit). F. qRT-PCR for β-actin transcripts with RNA purified with the indicated RNA purification protocols. G. Scatter plots and correlation values of amplified RNA (y-axis) to unamplified total tumor RNA (x-axis).

[0047] FIG. 3: Expression of novel TVM. A. qRT-PCR analysis of tumor vascular markers (TVM) in whole epithelial ovarian cancer (Ovarian Ca, n=20) and normal ovaries (Nml Ovary, n=5). Results are expressed as relative expression units against β-actin. B. Expression of select TVM by qRT-PCR in a panel of normal human tissues (Sm Intest, small intestine; Sk Muscle, skeletal muscle); expression in ovarian cancer (Ov Ca) is defined as 100%. C. Expression of select TVM by qRT-PCR in different tumor types; expression in ovarian cancer is defined as 100%. Data were normalized against CD31. D. Expression of TVM in tissues with physiologic angiogenesis including corpus luteum (Corp Lut); proliferative endometrium (Prolif Endomet); and placenta, as well as ovarian cancer (Ov Ca). Data were normalized against CD31. E. Expression of TVM in normal human tissues by digital northern derived from the NIH SAGE expression database. Sp Ch (spinal cord), Kid (kidney, Ov (ovary), Lym (lymph node), BM (bone marrow), Vasc (vasculature). Squares with 32-63 tags are indicated by a double arrow to the left. Squares with 16-31 tags have a single arrow to the left. The remainder of the light-colored squares had 15 or fewer tags. “EPB41L3” refers to EPB41L3. This figure also includes additional markers that do not appear in Table 5; selection of these additional markers is described below in Example 11.

[0048] FIG. 4. Part 1. Immuno-localization of identified markers to tumor vasculature. IHC is shown for CD24, endothelial lipase (Endo Lipase), FolH1 and AML-1. Immunofluorescent localization of SPON-1 to vascular structures and co-staining of PAR2, STC2 and AML-1 (red) with CD31 (green) in microvascular structures in human ovarian tumors. Merge includes nuclear staining with DAPI. Red fluorescence is shown alone in part 2. Green fluorescence is shown alone in part 3. Blue fluorescence from DAPI is shown alone in part 4.

[0049] FIG. 5. A. In-situ hybridization demonstrates expression of mRNA for the indicated tumor vascular markers in association with vascular structures in ovarian cancer. Negative controls included hybridization of tumor section with sense strand (Sense), hybridization of normal ovary with antisense probe (Nml Ov) and hybridization of RNAse-pretreated tumor section with antisense probe (RNAse Tx) for all TVM. Representative controls are shown for adlican, but were identical for all TVM. Merge is shown with DAPI nuclear staining. Red fluorescence is shown alone in part 2. Blue fluorescence from DAPI is shown alone in part 3.

[0050] FIG. 6. Expression of select TVM by qRT-PCR in FACS-purified VE-cadherin⁺ CD146⁺ CD45⁻ tumor endothelial cells (TEC) and VE-cadherin⁺ CD146⁺ CD45⁺ vascular leukocytes (VLC) compared with peripheral blood mononuclear cells (PBMC). Data were normalized against β-actin.

[0051] FIG. 7, part 1. Expression of novel human TVM by myeloid monocytic cells. A. Flow cytometry analysis; Top, Expression of CD45 (x-axis) and VE-cadherin (y-axis) in DC derived from PBMC prior to exposure to rhVEGF₁₆₅ (Pre VEGF-A) and following 7-day treatment with rhVEGF₁₆₅ (Post VEGF-A); VE-cadherin⁺ CD45⁺ cells appear after VEGF165 treatment. Middle, Expression of CD45 and VE-cadherin in DC derived from enriched monocytes prior to (Pre VEGF-A) and following 7-day treatment with rhVEGF₁₆₅ (Post VEGF-A); 91% of output cells after VEGF₁₆₅ treatment were VE-cadherin⁺ CD45⁺, indicating that double positive cells derived from the monocyte fraction. Bottom, No significant CFSE dilution was noted in monocyte-derived DC after VEGF₁₆₅ treatment, indicating no cell proliferation in these cultures. B. Expression of markers by PBMC-derived DC at baseline (Day 0) and following exposure to rhVEGF₁₆₅, with or without antibody against VEGF-A for 2 weeks. Induction of several tumor vascular markers and suppression of AML-1 and LZTS1 are observed after VEGF₁₆₅. This was abrogated by VEGF blockade, except for AML-1 and LTZS1. Data were normalized against β-actin. C. Expression of TVM in human 2008 ovarian cancer xenografts injected alone (2008) or enriched with human PBMC-derived DC pretreated with VEGF₁₆₅ ex vivo (DC), FACS-purified human tumor endothelial cells (TEC) or FACS-purified human tumor vascular leukocytes (VLC). TVM are expressed by xenografts enriched with human myeloid cells or TEC but not by xenografts generated with human tumor cells only. Data were normalized against human β-actin. D. Immunofluorescent detection of human CD34⁺ vascular structures within 2008 tumors supplemented with human PBMC-derived DC pretreated with VEGF₁₆₅: 1: One CD34-PE positive vessel was noted in the early tumor xenograft. 2 and 3: Merge of CD34-PE and DAPI depicts vascular structures at higher magnification. 4: Control tumor generated with 2008 cells alone without VEGF-pretreated DC, TEC or VLC shows no expression of human CD34. Similar results were obtained with immunostaining for human CD31. E. Raw data-described in legend for FIG. 7C.

[0052] FIG. 7, parts 2-3. Red fluorescence is shown alone in part 2. Blue fluorescence from DAPI is shown alone in part 3.

[0053] FIG. 8, part 1. Secreted (sec) and transmembrane (TM) TVM. Column 1: expression rank (described in Example 2). Column 2: “Scnt”: The number of normal samples that ranked in the bottom 4 positions. (e.g. if snt=4, the 4 lowest expressing samples are all normal samples). Column 3: Gene symbol. Column 4: Number of normal samples (4 total) in which the transcript was classified as present. Column 5: Number of tumor samples (21 total) in which the transcript was classified as present. Column 6: Mean signal from the tumor samples. Column 7: Mean signal from the normal samples. Column 8: Fold increase of expression in tumor samples. Column 9: foldc3: Value of 1 means that the fold change was (>3). 2 fold change was (<3). Column 10: srank25. 1 means that the sum of ranks <25. Criteria for this list was a value of “1” in at least one of column 9 and column 10.

[0054] FIG. 8, part 2. Column 1: Gene symbol. Column 2: Localization. Column 3: Description. Column 4: Available antibodies. Abbreviations: Pred: predicted; Mb: membrane; EC: extracellular; ECM extracellular matrix; PM: plasma membrane.

[0055] FIG. 9. A. Real-time PCR analysis of Adlican in normal tissues and ovarian cancer. B. In situ hybridization of adlican in ovarian cancer. C. Real-time PCR analysis of adlican in ovarian tumors. D. Western blot shows adlican protein in tumor tissue lysate (T1-3) but not normal ovary (Nml) (left) and in serum (S1-2) and ascites (A1-2) of patients with ovarian cancer but not normal human serum (NHS).

[0056] FIG. 10. Model of step-wise vascular differentiation of monocyte-derived DC precursors in tumors. VEGF-A alone induces in monocytes downregulation of transcriptional regulators AML-1 and LZTS1, while newly identified markers (collagen 11α1, DR6, FZD10, GPM6B, SCP1 and SPON-1) as well as known endothelial markers (VE-cadherin, TEM-1) are upregulated, yielding VLC. Additional factors from the tumor microenvironment cooperate with VEGF-A to induce additional TVM found in TEC, as myeloid cells structurally participate in the assembly of vasculature.

[0057] FIG. 11. Additional TVM.

[0058] FIG. 12. List of additional TVM from another analysis.

[0059] FIG. 13. A. DR6 mRNA expression by qPCR in normal tissues and ovarian tumor. B-D. IHC of DR6 in ovarian tumor (B), high-magnification image thereof (C), and normal ovary tissue (D).

[0060] FIG. 14. DR6 protein is detected at higher levels in the serum of patients with ovarian tumors compared to healthy individuals. A—Western. B—quantitation.

[0061] FIG. 15. Quantitation of ADAM12 mRNA relative expression by qPCR in normal tissues and ov tumor. A. Long isoform. B. Short isoform.

[0062] FIG. 16. Staining with anti-ADAM12 Ab in frozen ovarian tumor sections

[0063] FIG. 17. Double fluorescent staining with anti-ADAM12 Ab (red in original) and anti-CD31 Ab (green in original) in frozen ovarian tumor sections. Nuclei are stained blue. Top panel: green color alone (appears as white). Bottom: red color alone (appears as white).

[0064] FIG. 18. Double fluorescent staining with anti-ADAM12 Ab (red in original) and anti-CD45 Ab (green in original) in frozen ovarian tumor sections. Nuclei are stained blue. Top panel: green color alone (appears as white). Bottom: orange color alone, representing overlap of green and red staining (appears as white).

[0065] FIG. 19. CDCP1 mRNA relative expression in normal tissues and ovarian tumor (qPCR). A. Long isoform. B. Short isoform. Bars represent, from left to right: Ovarian tumor, bladder, esophagus, colon, liver, lung, brain, cervix, kidney, heart, adipose, testes, thymus, skeletal muscle, small intestine, spleen, trachea, ovary, placenta, thyroid, prostate.

[0066] FIG. 20. Staining with anti-CDCP1 Ab in frozen ovarian tumor sections.

[0067] FIG. 21. SLC11A1 mRNA expression by qPCR in normal tissues and ovarian tumor.

[0068] FIG. 22. Staining with anti-SLC11A1 Ab in frozen ovarian tumor sections. Left panels: sample from first patient, at low (top) and high (bottom) magnification. Right panels: sample from second patient, at low (top) and high (bottom) magnification.

[0069] FIG. 23. Double fluorescent staining with anti-SLC11A1 Ab (red in original) and anti-CD31 Ab (green in original) in frozen ovarian tumor sections. Nuclei are stained blue. A: green color alone (appears as white). B: red color alone (appears as white).

[0070] FIG. 24. Double fluorescent staining with anti-SLC11A1 Ab (red in original) and anti-CD45 Ab (green in original) in frozen ovarian tumor sections. Nuclei are stained blue. A: green color alone (appears as white). B: orange color alone, representing overlap of green and red staining (appears as white).

[0071] FIG. 25. BLAME mRNA expression by qPCR in normal tissues and ovarian tumor.

[0072] FIG. 26. Staining with anti-BLAME Ab in frozen ovarian tumor sections. A: samples from 2 patients at low magnification (40×). B: samples from 2 patients at high magnification (60×).

[0073] FIG. 27. A-B. Double fluorescent staining with anti-BLAME Ab (red in original) and anti-CD31 Ab (green in original) in frozen ovarian tumor sections. Nuclei are stained blue. A: green color alone. B: red color alone. C-E. Double fluorescent staining with anti-BLAME Ab (red in original) and anti-CD45 Ab (green in original) in frozen ovarian tumor sections. Nuclei are stained blue. C: green color alone. D: red color alone. E. orange color alone, representing overlap of green and red staining. Selected color (green, red, or orange) appears as white in each panel.

### DETAILED DESCRIPTION OF THE INVENTION

[0074] This invention provides methods of detecting and localizing tumor vasculature cells (TVC) and solid tumors; and treating, impeding vascularization of, and determining the stage of solid tumors in a subject, comprising the step of contacting a subject or a TVC with a ligand that binds to a nucleic acid molecule of the present invention, or binds to a protein encoded by the nucleic acid molecule.

[0075] In one embodiment, the present invention provides a method of localizing a solid tumor vasculature in a subject, the method comprising the steps of: (a) contacting the subject with a ligand that binds a DR6-encoding nucleic acid molecule or that binds a DR6 protein; and (b) localizing the ligand, thereby localizing a solid tumor vasculature in a subject. In another embodiment, the solid tumor is an ovarian tumor. In another embodiment, the solid tumor is any other type of solid tumor known in the art. Each possibility represents a separate embodiment of the present invention.

[0076] In another embodiment, the present invention provides a method of localizing a solid tumor vasculature in a subject, the method comprising the steps of: (a) contacting the subject with a ligand that binds an ADAM12-encoding nucleic acid molecule or that binds an ADAM12 protein; and (b) localizing the ligand, thereby localizing a solid tumor vasculature in a subject. In another embodiment, the solid tumor is an ovarian tumor. In another embodiment, the solid tumor is any other type of solid tumor known in the art. In another embodiment, the ADAM12-encoding nucleic acid molecule or ADAM12 protein is a short isoform thereof. In another embodiment, the nucleotide or protein is any other isoform known in the art. Each possibility represents a separate embodiment of the present invention.

[0077] In another embodiment, the present invention provides a method of localizing a solid tumor vasculature in a subject, the method comprising the steps of: (a) contacting the subject with a ligand that binds a long isoform of an ADAM12-encoding nucleic acid molecule or an ADAM12 protein; and (b) localizing the ligand, thereby localizing a solid tumor vasculature in a subject. In another embodiment, the solid tumor is an ovarian tumor. In another embodiment, the solid tumor is any other type of solid tumor known in the art. Each possibility represents a separate embodiment of the present invention.

[0078] In another embodiment, the present invention provides a method of localizing a solid tumor vasculature in a subject, the method comprising the steps of: (a) contacting the subject with a ligand that binds a CDCP1-CUB-encoding nucleic acid molecule or that binds a CDCP1-CUB protein; and (b) localizing the ligand, thereby localizing a solid tumor vasculature in a subject. In another embodiment, the solid tumor is an ovarian tumor. In another embodiment, the solid tumor is any other type of solid tumor known in the art. In another embodiment, the CDCP1-CUB-encoding nucleic acid molecule or CDCP1-CUB protein is a long isoform thereof. In another embodiment, the nucleotide or protein is any other isoform known in the art. Each possibility represents a separate embodiment of the present invention.

[0079] In another embodiment, the present invention provides a method of localizing a solid tumor vasculature in a subject, the method comprising the steps of: (a) contacting the subject with a ligand that binds a short isoform of a CDCP1-CUB-encoding nucleic acid molecule or a CDCP1-CUB protein; and (b) localizing the ligand, thereby localizing a solid tumor vasculature in a subject. In another embodiment, the solid tumor is an ovarian tumor. In another embodiment, the solid tumor is any other type of solid tumor known in the art. Each possibility represents a separate embodiment of the present invention.

[0080] In another embodiment, the present invention provides a method of localizing a solid tumor vasculature in a subject, the method comprising the steps of: (a) contacting the subject with a ligand that binds a SLC11A1-NRAMP-encoding nucleic acid molecule or that binds a SLC11A1-NRAMP protein; and (b) localizing the ligand, thereby localizing a solid tumor vasculature in a subject. In another embodiment, the solid tumor is an ovarian tumor. In another embodiment, the solid tumor is any other type of solid tumor known in the art. Each possibility represents a separate embodiment of the present invention.

[0081] In another embodiment, the present invention provides a method of localizing a solid tumor vasculature in a subject, the method comprising the steps of: (a) contacting the subject with a ligand that binds a BLAME/SLAMF8-encoding nucleic acid molecule or that binds a BLAME/SLAMF8 protein; and (b) localizing the ligand, thereby localizing a solid tumor vasculature in a subject. In another embodiment, the solid tumor is an ovarian tumor. In another embodiment, the solid tumor is any other type of solid tumor known in the art. Each possibility represents a separate embodiment of the present invention.

[0082] In another embodiment, the present invention provides a method of localizing a solid tumor vasculature in a subject, the method comprising the steps of: (a) contacting the subject with a ligand that binds an ESM1-encoding nucleic acid molecule or that binds an ESM1 protein; and (b) localizing the ligand, thereby localizing a solid tumor vasculature in a subject. In another embodiment, the solid tumor is a renal tumor. In another embodiment, the solid tumor is any other type of solid tumor known in the art. Each possibility represents a separate embodiment of the present invention.

[0083] In another embodiment, the present invention provides a method of localizing a solid tumor vasculature in a subject, the method comprising the steps of: (a) contacting the subject with a ligand that binds an EGFL6-encoding nucleic acid molecule or that binds an EGFL6 protein; and (b) localizing the ligand, thereby localizing a solid tumor vasculature in a subject. In another embodiment, the solid tumor is an ovarian tumor. In another embodiment, the solid tumor is any other type of solid tumor known in the art. Each possibility represents a separate embodiment of the present invention.

[0084] In another embodiment, the present invention provides a method of localizing a solid tumor vasculature in a subject, the method comprising the steps of: (a) contacting the subject with a ligand that binds an FZD10-encoding nucleic acid molecule or that binds an FZD10 protein; and (b) localizing the ligand, thereby localizing a solid tumor vasculature in a subject. In another embodiment, the solid tumor is an ovarian tumor. In another embodiment, the solid tumor is any other type of solid tumor known in the art. Each possibility represents a separate embodiment of the present invention.

[0085] In another embodiment, the present invention provides a method of localizing a solid tumor vasculature in a subject, the method comprising the steps of: (a) contacting the subject with a ligand that binds a COL11A1-encoding nucleic acid molecule or that binds a COL11A1 protein; and (b) localizing the ligand, thereby localizing a solid tumor vasculature in a subject. In another embodiment, the solid tumor is a breast cancer tumor. In another embodiment, the solid tumor is any other type of solid tumor known in the art. Each possibility represents a separate embodiment of the present invention.

[0086] In another embodiment, the present invention provides a method of localizing a solid tumor vasculature in a subject, the method comprising the steps of: (a) contacting the subject with a ligand that binds a TNFAIP6-encoding nucleic acid molecule or that binds a TNFAIP6 protein; and (b) localizing the ligand, thereby localizing a solid tumor vasculature in a subject. In another embodiment, the solid tumor is an ovarian tumor. In another embodiment, the solid tumor is any other type of solid tumor known in the art. Each possibility represents a separate embodiment of the present invention.

[0087] In another embodiment, the present invention provides a method of localizing a solid tumor vasculature in a subject, the method comprising the steps of: (a) contacting the subject with a ligand that binds an Adlican-encoding nucleic acid molecule or that binds an Adlican protein; and (b) localizing the ligand, thereby localizing a solid tumor vasculature in a subject. In another embodiment, the solid tumor is an ovarian tumor. In another embodiment, the solid tumor is any other type of solid tumor known in the art. Each possibility represents a separate embodiment of the present invention.

[0088] In another embodiment, the present invention provides a method of localizing a solid tumor vasculature in a subject, the method comprising the steps of: (a) contacting the subject with a ligand that binds a nucleic acid molecule selected from DSG2, c6orf55, SCGB2AI, EPSTI1, SEC23B, MS4A6A, LOC51136, KCNE3, KCNE4, c14orf100, C2orf6, KCNK5, C14orf28, PCDHB2, ST14, OLFML2B, GPR105, SDC1, FLJ46072, IVNS1ABP, SPP1, DKFZp762e1312, WFDC2, KIAA1892, C6orf69, and KIBRA, and (b) localizing the ligand, thereby localizing a solid tumor vasculature in a subject. In another embodiment, the solid tumor is an ovarian tumor. In another embodiment, the solid tumor is any other type of solid tumor known in the art. Each possibility represents a separate embodiment of the present invention.

[0089] In another embodiment, the present invention provides a method of localizing a solid tumor vasculature in a subject, the method comprising the steps of: (a) contacting the subject with a ligand that binds a nucleic acid molecule that encodes a protein selected from DSG2, c6orf55, SCGB2A1, EPSTI1, SEC23B, MS4A6A, LOC51136, KCNE3, KCNE4, c14orf100, C2orf6, KCNK5, C14orf28, PCDHB2, ST14, OLFML2B, GPR105, SDC1, FLJ46072, IVNS1ABP, SPP1, DKFZp762e1312, WFDC2, KIAA1892, C6orf69, and KIBRA, and (b) localizing the ligand, thereby localizing a solid tumor vasculature in a subject. In another embodiment, the solid tumor is an ovarian tumor. In another embodiment, the solid tumor is any other type of solid tumor known in the art. Each possibility represents a separate embodiment of the present invention.

[0090] In another embodiment, the present invention provides a method of localizing a solid tumor vasculature in a subject, the method comprising the steps of: (a) contacting the subject with a ligand that binds a protein selected from DSG2, c6orf55, SCGB2A1, EPSTI1, SEC23B, MS4A6A, LOC51136, KCNE3, KCNE4, c14orf100, C2orf6, KCNK5, C14orf28, PCDHB2, ST14, OLFML2B, GPR105, SDC1, FLJ46072, IVNS1ABP, SPP1, DKFZp762e1312, WFDC2, KIAA1892, C6orf69, and KIBRA, and (b) localizing the ligand, thereby localizing a solid tumor vasculature in a subject. In another embodiment, the solid tumor is an ovarian tumor. In another embodiment, the solid tumor is any other type of solid tumor known in the art. Each possibility represents a separate embodiment of the present invention.

[0091] In another embodiment, the present invention provides a method of treating a solid tumor in a subject, the method comprising the step of contacting the subject with an antibody or ligand that is conjugated to a cytotoxic agent or cytotoxic drug and that binds a nucleic acid molecule produced by the solid tumor, wherein the nucleic acid molecule is selected from DR6, ADAM12, CDCP1-CUB, SLC11A1-NRAMP, BLAME/SLAMF8, EGFL6, FZD10, TNFAIP6, Adlican, DSG2, c6orf55, SCGB2A1, EPSTI1, SEC23B, MS4A6A, LOC51136, KCNE3, KCNE4, c14orf100, C2orf6, KCNK5, C14orf28, PCDHB2, ST14, OLFML2B, GPR105, SDC1, FLJ46072, IVNS1ABP, SPP1, DKFZp762e1312, WFDC2, KIAA1892, C6orf69, and KIBRA, thereby treating a solid tumor in a subject. In another embodiment, the solid tumor is an ovarian tumor. In another embodiment, the solid tumor is any other type of solid tumor known in the art. Each possibility represents a separate embodiment of the present invention.

[0092] In another embodiment, the present invention provides a method of treating a solid tumor in a subject, the method comprising the step of contacting the subject with an antibody or ligand that is conjugated to a cytotoxic agent or cytotoxic drug and that binds a nucleic acid molecule produced by the solid tumor, wherein the nucleic acid molecule encodes a protein selected from DR6, ADAM12, CDCP1-CUB, SLC11A1-NRAMP, BLAME/SLAMF8, EGFL6, FZD10, TNFAIP6, Adlican, DSG2, c6orf55, SCGB2A1, EPSTI1, SEC23B, MS4A6A, LOC51136, KCNE3, KCNE4, c14orf100, C2orf6, KCNK5, C14orf28, PCDHB2, ST14, OLFML2B, GPR105, SDC1, FLJ46072, IVNS1ABP, SPP1, DKFZp762e1312, WFDC2, KIAA1892, C6orf69, and KIBRA, thereby treating a solid tumor in a subject. In another embodiment, the solid tumor is an ovarian tumor. In another embodiment, the solid tumor is any other type of solid tumor known in the art. Each possibility represents a separate embodiment of the present invention.

[0093] In another embodiment, the present invention provides a method of treating a solid tumor in a subject, the method comprising the step of contacting the subject with an antibody or ligand that is conjugated to a cytotoxic agent or cytotoxic drug and that binds a protein produced by the solid tumor, wherein the protein is selected from DR6, ADAM12, CDCP1-CUB, SLC11AI-NRAMP, BLAME/SLAMF8, EGFL6, FZD10, TNFAIP6, Adlican, DSG2, c6orf55, SCGB2A1, EPSTI1, SEC23B, MS4A6A, LOC51136, KCNE3, KCNE4, c14orf100, C2orf6, KCNK5, C14orf28, PCDHB2, ST14, OLFML2B, GPR105, SDC1, FLJ46072, IVNS1ABP, SPP1, DKFZp762e1312, WFDC2, KIAA1892, C6orf69, and KIBRA, thereby treating a solid tumor in a subject. In another embodiment, the solid tumor is an ovarian tumor. In another embodiment, the solid tumor is any other type of solid tumor known in the art. Each possibility represents a separate embodiment of the present invention.

[0094] “Ligand” refers, in another embodiment, to any molecule or structure capable of binding the target molecule. In another embodiment, “ligand” includes antibodies. In another embodiment, the term includes nucleotide molecules that hybridize to a target of interest. In another embodiment, the term includes small molecules with an affinity for the target. Each possibility represents a separate embodiment of the present invention.

[0095] In another embodiment, the present invention provides a method of treating a solid tumor in a subject, the method comprising the step of contacting the subject with an antibody or ligand that is conjugated to a cytotoxic agent or cytotoxic drug and that binds an ESM1-encoding nucleic acid molecule or ESM1 protein expressed by the tumor, thereby treating a solid tumor in a subject. In another embodiment, the solid tumor is a renal tumor. In another embodiment, the solid tumor is any other type of solid tumor known in the art. Each possibility represents a separate embodiment of the present invention.

[0096] In another embodiment, the present invention provides a method of treating a solid tumor in a subject, the method comprising the step of contacting the subject with an antibody or ligand that is conjugated to a cytotoxic agent or cytotoxic drug and that binds a COL11A1-encoding nucleic acid molecule or COL11A1 protein expressed by the tumor, thereby treating a solid tumor in a subject. In another embodiment, the solid tumor is a breast cancer tumor. In another embodiment, the solid tumor is any other type of solid tumor known in the art. Each possibility represents a separate embodiment of the present invention.

[0097] In another embodiment, the present invention provides a method of impeding a vascularization of a solid tumor in a subject, the method comprising the step of contacting the subject with a ligand capable of inhibiting an activity of a nucleic acid molecule selected from DR6, ADAM12, CDCP1-CUB, SLC11A1-NRAMP, BLAME/SLAMF8, EGFL6, FZD10, TNFAIP6, Adlican, DSG2, c6orf55, SCGB2A 1, EPSTI1, SEC23B, MS4A6A, LOC51136, KCNE3, KCNE4, c14orf100, C2orf6, KCNK5, C14orf28, PCDHB2, ST14, OLFML2B, GPR105, SDC1, FLJ46072, IVNS1ABP, SPP1, DKFZp762e1312, WFDC2, KIAA1892, C6orf69, and KIBRA, whereby the ligand is taken up by a vasculature cell of the solid tumor, thereby impeding a vascularization of a solid tumor in a subject. In another embodiment, the solid tumor is an ovarian tumor. In another embodiment, the solid tumor is any other type of solid tumor known in the art. Each possibility represents a separate embodiment of the present invention.

[0098] In another embodiment, the present invention provides a method of impeding a vascularization of a solid tumor in a subject, the method comprising the step of contacting the subject with a ligand capable of inhibiting an activity of a nucleic acid molecule encoding a protein selected from DR6, ADAM12, CDCP1-CUB, SLC11A1-NRAMP, BLAME/SLAMF8, EGFL6, FZD10, TNFAIP6, Adlican, DSG2, c6orf55, SCGB2A1, EPSTI1, SEC23B, MS4A6A, LOC51136, KCNE3, KCNE4, c14orf100, C2orf6, KCNK5, C14orf28, PCDHB2, ST14, OLFML2B, GPR105, SDC1, FLJ46072, IVNS1ABP, SPP1, DKFZp762e1312, WFDC2, KIAA1892, C6orf69, and KIBRA, whereby the ligand is taken up by a vasculature cell of the solid tumor, thereby impeding a vascularization of a solid tumor in a subject. In another embodiment, the solid tumor is an ovarian tumor. In another embodiment, the solid tumor is any other type of solid tumor known in the art. Each possibility represents a separate embodiment of the present invention.

[0099] In another embodiment, the present invention provides a method of impeding a vascularization of a solid tumor in a subject, the method comprising the step of contacting the subject with a ligand capable of inhibiting an activity of a protein selected from DR6, ADAM12, CDCP1-CUB, SLC11A1-NRAMP, BLAME/SLAMF8, EGFL6, FZD10, TNFAIP6, Adlican, DSG2, c6orf55, SCGB2A1, EPSTI1, SEC23B, MS4A6A, LOC51136, KCNE3, KCNE4, c14orf100, C2orf6, KCNK5, C14orf28, PCDHB2, ST14, OLFML2B, GPR105, SDC1, FLJ46072, IVNS1ABP, SPP1, DKFZp762e1312, WFDC2, KIAA1892, C6orf69, and KIBRA, whereby the ligand is taken up by a vasculature cell of the solid tumor, thereby impeding a vascularization of a solid tumor in a subject. In another embodiment, the solid tumor is an ovarian tumor. In another embodiment, the solid tumor is any other type of solid tumor known in the art. Each possibility represents a separate embodiment of the present invention.

[0100] In another embodiment, the present invention provides a method of impeding a vascularization of a solid tumor in a subject, the method comprising the step of contacting the subject with a ligand capable of inhibiting an activity of an ESM1-encoding nucleic acid molecule or an ESM1 protein, whereby the ligand is taken up by a vasculature cell of the solid tumor, thereby impeding a vascularization of a solid tumor in a subject. In another embodiment, the solid tumor is a renal tumor. In another embodiment, the solid tumor is any other type of solid tumor known in the art. Each possibility represents a separate embodiment of the present invention.

[0101] In another embodiment, the present invention provides a method of impeding a vascularization of a solid tumor in a subject, the method comprising the step of contacting the subject with a ligand capable of inhibiting an activity of a COL11A1-encoding nucleic acid molecule or a COL11A1 protein, whereby the ligand is taken up by a vasculature cell of the solid tumor, thereby impeding a vascularization of a solid tumor in a subject. In another embodiment, the solid tumor is a breast cancer tumor. In another embodiment, the solid tumor is any other type of solid tumor known in the art. Each possibility represents a separate embodiment of the present invention.

[0102] In another embodiment, the present invention provides a method of detecting a presence of a solid tumor in a subject, the method comprising the step of detecting a presence in a body fluid of the subject of an Adlican protein, whereby the presence in a body fluid of the protein indicates the presence of a solid tumor in the subject. In another embodiment, the solid tumor is an ovarian tumor. In another embodiment, the solid tumor is any other type of solid tumor known in the art. Each possibility represents a separate embodiment of the present invention.

[0103] In another embodiment, the present invention provides a method of detecting a presence of a solid tumor in a subject, the method comprising the step of detecting a presence in a body fluid of the subject of an Adlican-encoding nucleotide molecule, whereby the presence in a body fluid of the nucleotide molecule indicates the presence of a solid tumor in the subject. In another embodiment, the solid tumor is an ovarian tumor. In another embodiment, the solid tumor is any other type of solid tumor known in the art. Each possibility represents a separate embodiment of the present invention.

[0104] In another embodiment, the present invention provides a method of detecting a presence of a solid tumor in a subject, the method comprising the step of detecting a presence in a body fluid of the subject of a DR6 protein, whereby the presence in a body fluid of the protein indicates the presence of a solid tumor in the subject. In another embodiment, the solid tumor is an ovarian tumor. In another embodiment, the solid tumor is any other type of solid tumor known in the art. Each possibility represents a separate embodiment of the present invention.

[0105] In another embodiment, the present invention provides a method of detecting a presence of a solid tumor in a subject, the method comprising the step of detecting a presence in a body fluid of the subject of a DR6-encoding nucleotide molecule, whereby the presence in a body fluid of the nucleotide molecule indicates the presence of a solid tumor in the subject. In another embodiment, the solid tumor is an ovarian tumor. In another embodiment, the solid tumor is any other type of solid tumor known in the art. Each possibility represents a separate embodiment of the present invention.

[0106] In another embodiment, the present invention provides a method of detecting a presence of a solid tumor vasculature cell in a subject, the method comprising the step of detecting a presence in a body fluid of the subject of a protein selected from FLJ46072, IVNS1ABP, SPP1, TNPAIP6, DKFZp762e1312, WFDC2, KIAA1892, C6orf69, and KIBRA, whereby the presence in a body fluid of the protein indicates the presence of a solid tumor vasculature cell in the subject. In another embodiment, the solid tumor is an ovarian tumor. In another embodiment, the solid tumor is any other type of solid tumor known in the art. Each possibility represents a separate embodiment of the present invention.

[0107] In another embodiment, the present invention provides a method of detecting a presence of a solid tumor vasculature cell in a subject, the method comprising the step of detecting a presence in a body fluid of the subject of a nucleotide molecule that encodes a protein selected from FLJ46072, IVNS1ABP, SPP1, TNPAIP6, DKFZp762e1312, WFDC2, KIAA1892, C6orf69, and KIBRA, whereby the presence in a body fluid of the nucleotide molecule indicates the presence of a solid tumor vasculature cell in the subject. In another embodiment, the solid tumor is an ovarian tumor. In another embodiment, the solid tumor is any other type of solid tumor known in the art. Each possibility represents a separate embodiment of the present invention.

[0108] In another embodiment, the present invention provides a method of detecting a presence of a solid tumor vasculature cell in a subject, the method comprising the step of detecting a presence in a body fluid of the subject of a COL11A1 protein, whereby the presence in a body fluid of the protein indicates the presence of a solid tumor vasculature cell in the subject. In another embodiment, the solid tumor is a breast cancer tumor. In another embodiment, the solid tumor is any other type of solid tumor known in the art. Each possibility represents a separate embodiment of the present invention.

[0109] In another embodiment, the present invention provides a method of detecting a presence of a solid tumor vasculature in a subject, the method comprising the step of detecting a presence in a body fluid of the subject of a nucleotide molecule encoding a COL11A1 protein, whereby the presence in a body fluid of the nucleotide molecule indicates the presence of a solid tumor vasculature in the subject. In another embodiment, the solid tumor is a breast cancer tumor. In another embodiment, the solid tumor is any other type of solid tumor known in the art. Each possibility represents a separate embodiment of the present invention.

[0110] In another embodiment, the present invention provides a method of localizing an ovarian tumor vasculature in a subject, the method comprising the steps of: (a) contacting the subject with a ligand that binds a nucleic acid molecule, or that binds a protein encoded by the nucleic acid molecule, wherein the sequence of the nucleic acid molecule is set forth in SEQ ID No: 69; and (b) localizing the ligand, thereby localizing an ovarian tumor vasculature in a subject.

[0111] In another embodiment, the present invention provides a method of localizing an ovarian tumor vasculature in a subject, the method comprising the steps of: (a) contacting the subject with a ligand that binds a nucleic acid molecule, or that binds a protein encoded by the nucleic acid molecule, wherein the sequence of the nucleic acid molecule is set forth in SEQ ID No: 1; and (b) localizing the ligand, thereby localizing an ovarian tumor vasculature in a subject.

[0112] In another embodiment, the present invention provides a method of localizing an ovarian tumor vasculature in a subject, the method comprising the steps of: (a) contacting the subject with a ligand that binds a nucleic acid molecule, or that binds a protein encoded by the nucleic acid molecule, wherein the sequence of the nucleic acid molecule is set forth in SEQ ID No: 119; and (b) localizing the ligand, thereby localizing an ovarian tumor vasculature in a subject.

[0113] In another embodiment, the present invention provides a method of localizing an ovarian tumor vasculature in a subject, the method comprising the steps of: (a) contacting the subject with a ligand that binds a nucleic acid molecule, or that binds a protein encoded by the nucleic acid molecule, wherein the sequence of the nucleic acid molecule is set forth in SEQ ID No: 106; and (b) localizing the ligand, thereby localizing an ovarian tumor vasculature in a subject.

[0114] In another embodiment, the present invention provides a method of localizing an ovarian tumor vasculature in a subject, the method comprising the steps of: (a) contacting the subject with a ligand that binds a nucleic acid molecule, or that binds a protein encoded by the nucleic acid molecule, wherein the sequence of the nucleic acid molecule is set forth in SEQ ID No: 58; and (b) localizing the ligand, thereby localizing an ovarian tumor vasculature in a subject.

[0115] In another embodiment, the present invention provides a method of localizing a renal tumor vasculature in a subject, the method comprising the steps of: (a) contacting the subject with a ligand that binds a nucleic acid molecule, or that binds a protein encoded by the nucleic acid molecule, wherein the sequence of the nucleic acid molecule is set forth in SEQ ID No: 30; and (b) localizing the ligand, thereby localizing a renal tumor vasculature in a subject.

[0116] In another embodiment, the present invention provides a method of localizing an ovarian tumor vasculature in a subject, the method comprising the steps of: (a) contacting the subject with a ligand that binds a nucleic acid molecule, or that binds a protein encoded by the nucleic acid molecule, wherein the sequence of the nucleic acid molecule is set forth in SEQ ID No: 27; and (b) localizing the ligand, thereby localizing an ovarian tumor vasculature in a subject.

[0117] In another embodiment, the present invention provides a method of localizing an ovarian tumor vasculature in a subject, the method comprising the steps of: (a) contacting the subject with a ligand that binds a nucleic acid molecule, or that binds a protein encoded by the nucleic acid molecule, wherein the sequence of the nucleic acid molecule is set forth in SEQ ID No: 37; and (b) localizing the ligand, thereby localizing an ovarian tumor vasculature in a subject.

[0118] In another embodiment, the present invention provides a method of localizing a breast cancer tumor vasculature in a subject, the method comprising the steps of: (a) contacting the subject with a ligand that binds a nucleic acid molecule, or that binds a protein encoded by the nucleic acid molecule, wherein the sequence of the nucleic acid molecule is set forth in SEQ ID No: 21; and (b) localizing the ligand, thereby localizing a breast cancer tumor vasculature in a subject.

[0119] In another embodiment, the present invention provides a method of localizing an ovarian tumor vasculature in a subject, the method comprising the steps of: (a) contacting the subject with a ligand that binds a nucleic acid molecule, or that binds a protein encoded by the nucleic acid molecule, wherein the sequence of the nucleic acid molecule is set forth in SEQ ID No: 68; and (b) localizing the ligand, thereby localizing an ovarian tumor vasculature in a subject.

[0120] In another embodiment, the present invention provides a method of localizing an ovarian tumor vasculature in a subject, the method comprising the steps of: (a) contacting the subject with a ligand that binds a nucleic acid molecule, or that binds a protein encoded by the nucleic acid molecule, wherein the sequence of the nucleic acid molecule is set forth in SEQ ID No: 2; and (b) localizing the ligand, thereby localizing an ovarian tumor vasculature in a subject.

[0121] In another embodiment, the present invention provides a method of localizing an ovarian tumor vasculature in a subject, the method comprising the steps of: (a) contacting the subject with a ligand that binds a nucleic acid molecule, or that binds a protein encoded by the nucleic acid molecule, the nucleic acid molecule having a sequence selected from the sequences set forth in SEQ ID No: 13, 14, 26, 35, 39, 42, 43, 47, 104, 108, 111, 113, 116, 118, 121, 127, 130, 132, 134, 146, 152, 165, 169, 170, 179, and 181; and (b) localizing the ligand, thereby localizing an ovarian tumor vasculature in a subject.

[0122] In another embodiment, the present invention provides a method of treating an ovarian tumor in a subject, the method comprising the step of contacting the subject with an antibody or ligand that is conjugated to a cytotoxic agent or cytotoxic drug and that binds a nucleic acid molecule or a protein encoded by the nucleic acid molecule, wherein the sequence of the nucleic acid molecule is selected from the sequences set forth in SEQ ID No: 1, 2, 13, 14, 26, 27, 35, 37, 39, 42, 43, 47, 58, 68, 69, 104, 106, 108, 111, 113, 116, 118, 119, 121, 127, 130, 132, 134, 146, 152, 165, 169, 170, 179, and 181, thereby treating an ovarian tumor in a subject.

[0123] In another embodiment, the present invention provides a method of treating a renal tumor in a subject, the method comprising the step of contacting the subject with an antibody or ligand that is conjugated to a cytotoxic agent or cytotoxic drug and that binds a nucleic acid molecule or a protein encoded by the nucleic acid molecule, wherein the sequence of the nucleic acid molecule is set forth in SEQ ID No: 30, thereby treating a renal tumor in a subject.

[0124] In another embodiment, the present invention provides a method of treating a breast cancer tumor in a subject, the method comprising the step of contacting the subject with an antibody or ligand that is conjugated to a cytotoxic agent or cytotoxic drug and that binds a nucleic acid molecule or a protein encoded by the nucleic acid molecule, wherein the sequence of the nucleic acid molecule is set forth in SEQ ID No: 21, thereby treating a breast cancer tumor in a subject.

[0125] In another embodiment, the present invention provides a method of impeding a vascularization of an ovarian tumor in a subject, the method comprising the step of contacting the subject with a ligand capable of inhibiting an activity of a nucleic acid molecule or a protein encoded by the nucleic acid molecule wherein the sequence of the nucleic acid molecule is selected from the sequences set forth in SEQ ID No: 1, 2, 13, 14, 26, 27, 35, 37, 39, 42, 43, 47, 58, 68, 69, 104, 106, 108, 111, 113, 116, 118, 119, 121, 127, 130, 132, 134, 146, 152, 165, 169, 170, 179, and 181, whereby the ligand is taken up by a vasculature cell of the ovarian tumor, thereby impeding a vascularization of an ovarian tumor in a subject.

[0126] In another embodiment, the present invention provides a method of impeding a vascularization of a renal tumor in a subject, the method comprising the step of contacting the subject with a ligand capable of inhibiting an activity of a nucleic acid molecule or a protein encoded by the nucleic acid molecule wherein the sequence of the nucleic acid molecule is set forth in SEQ ID No: 30, whereby the ligand is taken up by a vasculature cell of the renal tumor, thereby impeding a vascularization of a solid tumor in a subject.

[0127] In another embodiment, the present invention provides a method of impeding a vascularization of a breast cancer tumor in a subject, the method comprising the step of contacting the subject with a ligand capable of inhibiting an activity of a nucleic acid molecule or a protein encoded by the nucleic acid molecule wherein the sequence of the nucleic acid molecule is set forth in SEQ ID No: 21, whereby the ligand is taken up by a vasculature cell of the breast cancer tumor, thereby impeding a vascularization of a solid tumor in a subject.

[0128] In another embodiment, the present invention provides a method of detecting a presence of an ovarian tumor in a subject, the method comprising the step of detecting a presence in a body fluid of the subject of a protein encoded by a nucleotide molecule, wherein the sequence of the nucleotide molecule is set forth in SEQ ID No: 2, whereby the presence in a body fluid of the protein indicates the presence of an ovarian tumor in the subject.

[0129] In another embodiment, the present invention provides a method of detecting a presence of an ovarian tumor in a subject, the method comprising the step of detecting a presence in a body fluid of the subject of a nucleotide molecule, wherein the sequence of the nucleotide molecule is set forth in SEQ ID No: 2, whereby the presence in a body fluid of the nucleotide molecule indicates the presence of an ovarian tumor in the subject.

[0130] In another embodiment, the present invention provides a method of detecting a presence of an ovarian tumor in a subject, the method comprising the step of detecting a presence in a body fluid of the subject of a protein encoded by a nucleotide molecule, wherein the sequence of the nucleotide molecule is set forth in SEQ ID No: 69, whereby the presence in a body fluid of the protein indicates the presence of an ovarian tumor in the subject.

[0131] In another embodiment, the present invention provides a method of detecting a presence of an ovarian tumor in a subject, the method comprising the step of detecting a presence in a body fluid of the subject of a nucleotide molecule, wherein the sequence of the nucleotide molecule is set forth in SEQ ID No: 69, whereby the presence in a body fluid of the nucleotide molecule indicates the presence of an ovarian tumor in the subject.

[0132] In another embodiment, the present invention provides a method of detecting a presence of an ovarian tumor vasculature cell in a subject, the method comprising the step of detecting a presence in a body fluid of the subject of a protein encoded by a nucleotide molecule selected from SEQ ID No: 14, 35, 42, 68, 121, 127, 169, 179, and 181, whereby the presence in a body fluid of the protein indicates the presence of an ovarian tumor vasculature cell in the subject.

[0133] In another embodiment, the present invention provides a method of detecting a presence of an ovarian tumor vasculature cell in a subject, the method comprising the step of detecting a presence in a body fluid of the subject of a nucleotide molecule selected from SEQ ID No: 14, 35, 42, 68, 121, 127, 169, 179, and 181, whereby the presence in a body fluid of the nucleotide molecule indicates the presence of an ovarian tumor vasculature cell in the subject.

[0134] In another embodiment, the present invention provides a method of detecting a presence of a breast cancer vasculature in a subject, the method comprising the step of detecting a presence in a body fluid of the subject of a protein encoded by a SEQ ID No: 21, whereby the presence in a body fluid of the protein indicates the presence of a breast cancer vasculature in the subject.

[0135] In another embodiment, the present invention provides a method of detecting a presence of a breast cancer vasculature cell in a subject, the method comprising the step of detecting a presence in a body fluid of the subject of a nucleotide molecule, wherein the sequence of the nucleotide molecule is set forth in SEQ ID No: 21, whereby the presence in a body fluid of the nucleotide molecule indicates the presence of a breast cancer vasculature cell in the subject.

[0136] In another embodiment, the present invention provides a method of detecting the presence of a TVC in a subject, the method comprising the steps of (a) contacting the subject with a ligand that binds to a nucleic acid molecule, the nucleic acid molecule encoding a protein selected from an Adlican protein; a collagen, type XI, alpha 1 (COL11A1) protein; a Defensin, beta 1 (DEFB1) protein; an EPB41L3 protein; a Coagulation factor II (thrombin) receptor-like 1 (F2RL1) protein; a Frizzled 10 (FZD10) protein; a Glycoprotein M6B (GPM6B) protein; a B lymphocyte activator macrophage expressed (BLAME) protein; a Spondin 1 (SPON-1) protein; a Stanniocalcin 2 (STC2) protein; a Tumor necrosis factor, alpha-induced protein 6 (TNFAIP6) protein; and a Tumor necrosis factor receptor superfamily, member 21 (TNFRSF21) protein; and (b) imaging the ligand in the subject, whereby, if the ligand is concentrated in an area of a tissue of the subject, then the subject has a TVC in the area.

[0137] “Nucleic acid molecule” and “nucleotide” refer, in another embodiment, to an RNA molecule. In another embodiment, the terms refer to a DNA molecule. In another embodiment, the terms refer to any other type of nucleic acid molecule enumerated herein. In another embodiment, the terms refer to any other type of nucleic acid molecule known in the art. Each possibility represents a separate embodiment of the present invention.

[0138] In another embodiment, the present invention provides a method of detecting the presence of a TVC in a subject, the method comprising the steps of (a) contacting the subject with a ligand that binds to a protein selected from an Adlican protein, a COL11A1 protein, a DEFB1 protein, an EPB41L3 protein, a F2RL1 protein, an FZD10 protein, a GPM6B protein, a BLAME protein, a SPON1 protein, a STC2 protein, a TNFAIP6 protein, and a TNFRSF21 protein; and (b) imaging the ligand in the subject, whereby, if the ligand is concentrated in an area of a tissue of the subject, then the subject has a TVC in the area.

[0139] In another embodiment, the present invention provides a method of detecting the presence of a TVC in a subject, the method comprising the steps of (a) contacting the subject with a ligand that binds to a nucleic acid molecule, the nucleic acid molecule encoding a protein selected from an AML-1 protein and an LZTS1 protein; and (b) imaging the ligand in the subject, whereby, if the ligand is concentrated in an area of a tissue of the subject, then the subject has a TVC in the area.

[0140] In another embodiment, the present invention provides a method of detecting the presence of a TVC in a subject, the method comprising the steps of (a) contacting the subject with a ligand that binds to a protein selected from an AML-1 protein and an LZTS1 protein; and (b) imaging the ligand in the subject, whereby, if the ligand is concentrated in an area of a tissue of the subject, then the subject has a TVC in the area.

[0141] In another embodiment, the present invention provides a method of detecting the presence of a TVC in a subject, the method comprising the steps of (a) contacting the subject with a ligand that binds to a nucleic acid molecule, the nucleic acid molecule encoding a protein selected from selected from FAD104; WARP; BCAP29; CDH1; FLJ10826; OPN3; HIATL2; IL28RA; TMEM19; C10orf69; FRAP1; CKLFSF6; MPHOSPH9; CLST11240; MS4A6A; SGPP2; SLC11A1; SLCO3A1; LOC51136; DKFZp56411922; KCNE3; CALM3; KCNE4; MGC34647; MUC1; SDC1; SLC30A6; ST14; CDCP1; TLCD1; SPTB; FNDC3; SPRY1; MME; INSR; LPPR4; C14orf100; SLC9A5; SCGB2A1; FLT1; MOBK1B; TMEM2; TMEM8; SLC5A4; MEST; CHODL; TRIO; IL10RA; LGALS3BP; STK4; ERBB3; C14orf28; KIAA1024; KIAA1906; F3; PCDHB2; KIAA0703; C1orf10; POLYDOM; TUBAL3; GPR105; IL7R; ARHGAP18; GRM1; PREX1; MUC3A; EPSTI1; and UBE2J1; and (b) imaging the ligand in the subject, whereby, if the ligand is concentrated in an area of a tissue of the subject, then the subject has a TVC in the area.

[0142] In another embodiment, the present invention provides a method of detecting the presence of a TVC in a subject, the method comprising the steps of (a) contacting the subject with a ligand that binds to a protein selected from FAD104; WARP; BCAP29; CDH1; FLJ10826; OPN3; HIATL2; IL28RA; TMEM19; C10orf69; FRAP1; CKLFSF6; MPHOSPH9; CLST11240; MS4A6A; SGPP2; SLC11A1; SLCO3A1; LOC51136; DKFZp56411922; KCNE3; CALM3; KCNE4; MGC34647; MUC1; SDC1; SLC30A6; ST14; CDCP1; TLCD1; SPTB; FNDC3; SPRY1; MME; INSR; LPPR4; C14orf100; SLC9A5; SCGB2A1; FLT1; MOBK1B; TMEM2; TMEM8; SLC5A4; MEST; CHODL; TRIO; IL10RA; LGALS3BP; STK4; ERBB3; C14orf28; KIAA1024; KIAA1906; F3; PCDHB2; KIAA0703; C1orf10; POLYDOM; TUBAL3; GPR105; IL7R; ARHGAP18; GRM1; PREX1; MUC3A; EPSTI1; and UBE2J1; and (b) imaging the ligand in the subject, whereby, if the ligand is concentrated in an area of a tissue of the subject, then the subject has a TVC in the area.

[0143] “Imaging” refers, in another embodiment, to localizing a ligand of interest using an imaging or scanning technology. In another embodiment, the ligand is a fluorescent ligand. In another embodiment, the ligand is radioactive. In another embodiment, the ligand is bound by a molecule (e.g. an antibody) that is detectable by the imaging or scanning technology. In another embodiment, any suitable imaging or scanning technology known in the art may be utilized. Each possibility represents a separate embodiment of the present invention.

[0144] In another embodiment of methods of the present invention, the TVM is expressed at detectable levels only in the TVC, but not in the surrounding tissue. In another embodiment, the TVC is expressed at significantly higher levels in the TVC, relative to the surrounding tissue. In another embodiment, the TVM is expressed at detectable levels only in the TVC, but not in other body tissues. In another embodiment, the TVC is expressed at significantly higher levels in the TVC, relative to other body tissues. Each possibility represents a separate embodiment of the present invention.

[0145] As provided herein, a rapid protocol was developed and optimized for immuno-LCM of TVC, followed by extraction and amplification of RNA for array analysis of tumor vascular cells (Example 1). This enabled identification of the novel tumor vasculature markers (TVM) of the present invention. The identified transcripts and proteins encoded thereby were validated as TVM by a number of independent lines of evidence, including enrichment in independent tumor samples, relative to normal vascular samples; enrichment in tumor tissue relative to a variety of tissue samples; and comparison of expression levels between tumor tissue and tissues with physiologic angiogenesis (Example 3).

[0146] In another embodiment, the present invention provides a method of detecting a solid tumor in a subject, the method comprising the steps of (a) contacting the subject with a ligand that binds to a nucleic acid molecule, the nucleic acid molecule encoding a protein selected from an Adlican protein, a COL11A1 protein, a DEFB1 protein, an EPB41L3 protein, a F2RL1 protein, an FZD10 protein, a GPM6B protein, a BLAME protein, a SPON1 protein, a STC2 protein, a TNFAIP6 protein, and a TNFRSF21 protein; and (b) imaging the ligand in the subject, whereby, if the ligand is concentrated in an area of a tissue of the subject, then the subject has a solid tumor in the area.

[0147] In another embodiment, the present invention provides a method of detecting a solid tumor in a subject, the method comprising the steps of (a) contacting the subject with a ligand that binds to a protein selected from an Adlican protein, a COL11A1 protein, a DEFB1 protein, an EPB41L3 protein, a F2RL1 protein, an FZD10 protein, a GPM6B protein, a BLAME protein, a SPON1 protein, a STC2 protein, a TNFAIP6 protein, and a TNFRSF21 protein; and (b) imaging the ligand in the subject, whereby, if the ligand is concentrated in an area of a tissue of the subject, then the subject has a solid tumor in the area.

[0148] In another embodiment, the present invention provides a method of detecting a solid tumor in a subject, the method comprising the steps of (a) contacting the subject with a ligand that binds to a nucleic acid molecule, the nucleic acid molecule encoding a protein selected from an AML-1 protein and an LZTS1 protein; and (b) imaging the ligand in the subject, whereby, if the ligand is concentrated in an area of a tissue of the subject, then the subject has a solid tumor in the area.

[0149] In another embodiment, the present invention provides a method of detecting a solid tumor in a subject, the method comprising the steps of (a) contacting the subject with a ligand that binds to a protein selected from an AML-1 protein and an LZTS1 protein; and (b) imaging the ligand in the subject, whereby, if the ligand is concentrated in an area of a tissue of the subject, then the subject has a solid tumor in the area.

[0150] In another embodiment, the present invention provides a method of detecting a solid tumor in a subject, the method comprising the steps of (a) contacting the subject with a ligand that binds to a nucleic acid molecule, the nucleic acid molecule encoding a protein selected from FAD104; WARP; BCAP29; CDH1; FLJ10826; OPN3; HIATL2; IL28RA; TMEM19; C10orf69; FRAP1; CKLFSF6; MPHOSPH9; CLST11240; MS4A6A; SGPP2; SLC11A1; SLCO3A1; LOC51136; DKFZp56411922; KCNE3; CALM3; KCNE4; MGC34647; MUC1; SDC1; SLC30A6; ST14; CDCP1; TLCD1; SPTB; FNDC3; SPRY1; MME; INSR; LPPR4; C14orf100; SLC9A5; SCGB2A1; FLT1; MOBK1B; TMEM2; TMEM8; SLC5A4; MEST; CHODL; TRIO; IL10RA; LGALS3BP; STK4; ERBB3; C14orf28; KIAA1024; KIAA1906; F3; PCDHB2; KIAA0703; C1orf10; POLYDOM; TUBAL3; GPR105; IL7R; ARHGAP18; GRM1; PREX1; MUC3A; EPSTI1; and UBE2A1; and (b) imaging the ligand in the subject, whereby, if the ligand is concentrated in an area of a tissue of the subject, then the subject has a solid tumor in the area.

[0151] In another embodiment, the present invention provides a method of detecting a solid tumor in a subject, the method comprising the steps of (a) contacting the subject with a ligand that binds to a protein selected from FAD104; WARP; BCAP29; CDH1; FLJ10826; OPN3; HIATL2; IL28RA; TMEM19; C10orf69; FRAP1; CKLFSF6; MPHOSPH9; CLST11240; MS4A6A; SGPP2; SLC1A1; SLCO3A1; LOC51136; DKFZp56411922; KCNE3; CALM3; KCNE4; MGC34647; MUC1; SDC1; SLC30A6; ST14; CDCP1; TLCD1; SPTB; FNDC3; SPRY1; MME; INSR; LPPR4; C14orf100; SLC9A5; SCGB2A1; FLT1; MOBK1B; TMEM2; TMEM8; SLC5A4; MEST; CHODL; TRIO; IL10RA; LGALS3BP; STK4; ERBB3; C14orf28; KIAA1024; KIAA1906; F3; PCDHB2; KIAA0703; C1orf10; POLYDOM; TUBAL3; GPR105; IL7R; ARHGAP18; GRM1; PREX1; MUC3A; EPSTI1; and UBE2J1; and (b) imaging the ligand in the subject, whereby, if the ligand is concentrated in an area of a tissue of the subject, then the subject has a solid tumor in the area.

[0152] In another embodiment, the present invention provides a method of localizing a tumor vasculature in a subject, the method comprising the steps of (a) contacting the tumor vasculature with a ligand that binds to a nucleic acid molecule, the nucleic acid molecule encoding a protein selected from a DEFB1 protein, an EPB41L3 protein, a F2RL1 protein, a GPM6B protein, a SPON1 protein, and a STC2 protein; and (b) localizing the ligand, thereby localizing a tumor vasculature.

[0153] As provided herein, certain TVM transcripts of the present invention and the proteins encoded thereby are efficacious in localizing solid tumors and vasculature thereof (Examples 4 and 5).

[0154] In another embodiment, the present invention provides a method of localizing a tumor vasculature in a subject, the method comprising the steps of (a) contacting the tumor vasculature with a ligand that binds to a protein selected from a DEFB1 protein, an EPB41L3 protein, a F2RL1 protein, a GPM6B protein, a SPON1 protein, and a STC2 protein; and (b) localizing the ligand, thereby localizing a tumor vasculature in a subject.

[0155] In another embodiment, the present invention provides a method of localizing a tumor vasculature in a subject, the method comprising the steps of (a) contacting the tumor vasculature with a ligand that binds to a nucleic acid molecule, the nucleic acid molecule encoding a protein selected from an AML-1 protein and an LZTS1 protein; and (b) localizing the ligand, thereby localizing a tumor vasculature in a subject.

[0156] In another embodiment, the present invention provides a method of localizing a tumor vasculature in a subject, the method comprising the steps of (a) contacting the tumor vasculature with a ligand that binds to a protein selected from an AML-1 protein and an LZTS1 protein; and (b) localizing the ligand, thereby localizing a tumor vasculature in a subject.

[0157] In another embodiment, the present invention provides a method of localizing a tumor vasculature in a subject, the method comprising the steps of (a) contacting the tumor vasculature with a ligand that binds to a nucleic acid molecule, the nucleic acid molecule encoding a protein selected from FAD104; WARP; BCAP29; CDH1; FLJ10826; OPN3; HIATL2; IL28RA; TMEM19; C10orf69; FRAP1; CKLFSF6; MPHOSPH9; CLST11240; SGPP2; SLCO3A1; DKFZp56411922; CALM3; MGC34647; MUC1; SLC30A6; TLCD1; SPTB; FNDC3; SPRY1; MME; INSR; LPPR4; C14orf100; SLC9A5; SCGB2A1; FLT1; MOBK1B; TMEM2; TMEM8; SLC5A4; MEST; CHODL; TRIO; IL10RA; LGALS3BP; STK4; ERBB3; C14orf28; KIAA1024; KIAA1906; F3; PCDHB2; KIAA0703; C1orf10; POLYDOM; TUBAL3; IL7R; ARHGAP18; GRM1; PREX1; MUC3A; and UBE2J1; and (b) localizing the ligand, thereby localizing a tumor vasculature in a subject.

[0158] In another embodiment, the present invention provides a method of localizing a tumor vasculature in a subject, the method comprising the steps of (a) contacting the tumor vasculature with a ligand that binds to a protein selected from FAD104; WARP; BCAP29; CDH1; FLJ10826; OPN3; HIATL2; IL28RA; TMEM19; C10orf69; FRAP1; CKLFSF6; MPHOSPH9; CLST11240; SGPP2; SLCO3A1; DKFZp56411922; CALM3; MGC34647; MUC1; SLC30A6; TLCD1; SPTB; FNDC3; SPRY1; MME; INSR; LPPR4; C14orf100; SLC9A5; SCGB2A1; FLT1; MOBK1B; TMEM2; TMEM8; SLC5A4; MEST; CHODL; TRIO; IL10RA; LGALS3BP; STK4; ERBB3; C14orf28; KIAA1024; KIAA1906; F3; PCDHB2; KIAA0703; C1orf10; POLYDOM; TUBAL3; IL7R; ARHGAP18; GRM1; PREX1; MUC3A; and UBE2J1; and (b) localizing the ligand, thereby localizing a tumor vasculature in a subject.

[0159] In another embodiment, the present invention provides a method of localizing a solid tumor in a subject, the method comprising the steps of (a) contacting the subject with a ligand that binds to a nucleic acid molecule, the nucleic acid molecule encoding a protein selected from an Adlican protein, a COL11A1 protein, a DEFB1 protein, an EPB41L3 protein, a F2RL1 protein, an FZD10 protein, a GPM6B protein, a BLAME protein, a SPON1 protein, a STC2 protein, a TNFAIP6 protein, and a TNFRSF21 protein; and (b) localizing the ligand, thereby localizing a solid tumor in a subject.

[0160] In another embodiment, the present invention provides a method of localizing a solid tumor in a subject, the method comprising the steps of (a) contacting the subject with a ligand that binds to a protein selected from an Adlican protein, a COL11A1 protein, a DEFB1 protein, an EPB41L3 protein, a F2RL1 protein, an FZD10 protein, a GPM6B protein, a BLAME protein, a SPON1 protein, a STC2 protein, a TNFAIP6 protein, and a TNFRSF21 protein; and (b) localizing the ligand, thereby localizing a solid tumor in a subject.

[0161] In another embodiment, the present invention provides a method of localizing a solid tumor in a subject, the method comprising the steps of (a) contacting the subject with a ligand that binds to a nucleic acid molecule, the nucleic acid molecule encoding a protein selected from an AML-1 protein and an LZTS1 protein; and (b) localizing the ligand, thereby localizing a solid tumor in a subject.

[0162] In another embodiment, the present invention provides a method of localizing a solid tumor in a subject, the method comprising the steps of (a) contacting the subject with a ligand that binds to a protein selected from an AML-1 protein and an LZTS1 protein; and (b) localizing the ligand, thereby localizing a solid tumor in a subject.

[0163] In another embodiment, the present invention provides a method of localizing a solid tumor in a subject, the method comprising the steps of (a) contacting the subject with a ligand that binds to a nucleic acid molecule, the nucleic acid molecule encoding a protein selected from FAD104; WARP; BCAP29; CDH1; FLJ10826; OPN3; HIATL2; IL28RA; TMEM19; C10orf69; FRAP1; CKLFSF6; MPHOSPH9; CLST11240; MS4A6A; SGPP2; SLC11A1; SLC03A1; LOC51136; DKFZp56411922; KCNE3; CALM3; KCNE4; MGC34647; MUC1; SDC1; SLC30A6; ST14; CDCP1; TLCD1; SPTB; FNDC3; SPRY1; MME; INSR; LPPR4; C14orf100; SLC9A5; SCGB2A1; FLT1; MOBK1B; TMEM2; TMEM8; SLC5A4; MEST; CHODL; TRIO; IL10RA; LGALS3BP; STK4; ERBB3; C14orf28; KIAA1024; KIAA1906; F3; PCDHB2; KIAA0703; C1orf10; POLYDOM; TUBAL3; GPR105; IL7R; ARHGAP18; GRM1; PREX1; MUC3A; EPSTI1; and UBE2J1; and (b) localizing the ligand, thereby localizing a solid tumor in a subject.

[0164] In another embodiment, the present invention provides a method of localizing a solid tumor in a subject, the method comprising the steps of (a) contacting the subject with a ligand that binds to a protein selected from FAD104; WARP; BCAP29; CDH1; FLJ10826; OPN3; HIATL2; IL28RA; TMEM19; C10orf69; FRAP1; CKLFSF6; MPHOSPH9; CLST11240; MS4A6A; SGPP2; SLC11A1; SLCO3A1; LOC51136; DKFZp56411922; KCNE3; CALM3; KCNE4; MGC34647; MUC1; SDC1; SLC30A6; ST14; CDCP1; TLCD1; SPTB; FNDC3; SPRY1; MME; INSR; LPPR4; C14orf100; SLC9A5; SCGB2A1; FLT1; MOBK1B; TMEM2; TMEM8; SLC5A4; MEST; CHODL; TRIO; IL10RA; LGALS3BP; STK4; ERBB3; C14orf28; KIAA1024; KIAA1906; F3; PCDHB2; KIAA0703; C1orf10; POLYDOM; TUBAL3; GPR105; IL7R; ARHGAP18; GRM1; PREX1; MUC3A; EPSTI1; and UBE2J1; and (b) localizing the ligand, thereby localizing a solid tumor in a subject.

[0165] In another embodiment, a method of present invention of localizing or detecting a tumor, TVC, or tumor vasculature utilizes positron-emission tomography (PET) scanning. In another embodiment, the method utilizing any other imaging technique known in the art. Each possibility represents a separate embodiment of the present invention.

[0166] In another embodiment, the present invention provides a method of treating a solid tumor in a subject, the method comprising the step of contacting the subject with an antibody or ligand that is conjugated to a anti-cancer agent and that binds to a nucleic acid molecule, the nucleic acid molecule encoding a protein selected from a DEFB1 protein, an EPB41L3 protein, a F2RL1 protein, a GPM6B protein, a SPON1 protein, and a STC2 protein, thereby treating a solid tumor in a subject.

[0167] In another embodiment, the present invention provides a method of treating a solid tumor in a subject, the method comprising the step of contacting the subject with an antibody or ligand that is conjugated to a anti-cancer agent and that binds to a protein selected from a DEFB1 protein, an EPB41L3 protein, a F2RL1 protein, a GPM6B protein, a SPON1 protein, and a STC2 protein, thereby treating a solid tumor in a subject.

[0168] In another embodiment, the present invention provides a method of treating a solid tumor in a subject, the method comprising the step of contacting the subject with an antibody or ligand that is conjugated to a anti-cancer agent and that binds to a nucleic acid molecule, the nucleic acid molecule encoding a protein selected from an AML-1 protein and an LZTS1 protein, thereby treating a solid tumor in a subject.

[0169] In another embodiment, the present invention provides a method of treating a solid tumor in a subject, the method comprising the step of contacting the subject with an antibody or ligand that is conjugated to a anti-cancer agent and that binds to a protein selected from an AML-1 protein and an LZTS1 protein, thereby treating a solid tumor in a subject.

[0170] In another embodiment, the present invention provides a method of treating a solid tumor in a subject, the method comprising the step of contacting the subject with an antibody or ligand that is conjugated to a anti-cancer agent and that binds to a nucleic acid molecule, the nucleic acid molecule encoding a protein selected from FAD104; WARP; BCAP29; CDH1; FLJ10826; OPN3; HIATL2; IL28RA; TMEM19; C10orf69; FRAP1; CKLFSF6; MPHOSPH9; CLST11240; SGPP2; SLCO3A1; DKFZp56411922; CALM3; MGC34647; MUC1; SLC30A6; TLCD1; SPTB; FNDC3; SPRY1; MME; INSR; LPPR4; C14orf100; SLC9A5; SCGB2A1; FLT1; MOBK1B; TMEM2; TMEM8; SLC5A4; MEST; CHODL; TRIO; IL10RA; LGALS3BP; STK4; ERBB3; C14orf28; KIAA1024; KIAA1906; F3; PCDHB2; KIAA0703; C1orf10; POLYDOM; TUBAL3; IL7R; ARHGAP18; GRM1; PREX1; MUC3A; and UBE2J1, thereby treating a solid tumor in a subject.

[0171] In another embodiment, the present invention provides a method of treating a solid tumor in a subject, the method comprising the step of contacting the subject with an antibody or ligand that is conjugated to a anti-cancer agent and that binds to a protein selected from FAD104; WARP; BCAP29; CDH1; FLJ10826; OPN3; HIATL2; IL28RA; TMEM19; C10orf69; FRAP1; CKLFSF6; MPHOSPH9; CLST11240; SGPP2; SLCO3A1; DKFZp56411922; CALM3; MGC34647; MUC1; SLC30A6; TLCD1; SPTB; FNDC3; SPRY1; MME; INSR; LPPR4; C14orf100; SLC9A5; SCGB2A1; FLT1; MOBK1B; TMEM2; TMEM8; SLC5A4; MEST; CHODL; TRIO; IL10RA; LGALS3BP; STK4; ERBB3; C14orf28; KIAA1024; KIAA1906; F3; PCDHB2; KIAA0703; C1orf10; POLYDOM; TUBAL3; IL7R; ARHGAP18; GRM1; PREX1; MUC3A; and UBE2J1, thereby treating a solid tumor in a subject.

[0172] As provided in the Examples herein, certain TVM of the present invention are expressed at detectable levels only by TVC. In another embodiment, the TVM are expressed at higher levels by TVC than by healthy tissue. Thus, TVM provide a means of specifically targeting therapeutic modalities to solid tumors and their vasculature.

[0173] In another embodiment, the present invention provides a method of inducing a regression of a solid tumor in a subject, the method comprising the step of contacting the subject with an antibody or ligand that is conjugated to a anti-cancer agent and that binds to a nucleic acid molecule, the nucleic acid molecule encoding a protein selected from an Adlican protein, a COL11A1 protein, a DEFB1 protein, an EPB41L3 protein, a F2RL1 protein, an FZD10 protein, a GPM6B protein, a BLAME protein, a SPON1 protein, a STC2 protein, a TNFAIP6 protein, and a TNFRSF21 protein, thereby inducing a regression of a solid tumor in a subject.

[0174] In another embodiment, the present invention provides a method of inducing a regression of a solid tumor in a subject, the method comprising the step of contacting the subject with an antibody or ligand that is conjugated to a anti-cancer agent and that binds to a protein selected from an Adlican protein, a COL11A1 protein, a DEFB1 protein, an EPB41L3 protein, a F2RL1 protein, an FZD10 protein, a GPM6B protein, a BLAME protein, a SPON1 protein, a STC2 protein, a TNFAIP6 protein, and a TNFRSF21 protein, thereby inducing a regression of a solid tumor in a subject.

[0175] The anti-cancer agent utilized in methods and compositions of the present invention is, in another embodiment, a radioactive isotope. In another embodiment, the anti-cancer agent is a cytotoxic agent. In another embodiment, the anti-cancer agent is a cytotoxic drug. In another embodiment, the anti-cancer agent is a nucleic acid molecule. In another embodiment, the anti-cancer agent is an antisense molecule. In another embodiment, the anti-cancer agent is an RNA inhibitory molecule. In another embodiment, the anti-cancer agent is an anti-tumor agent. In another embodiment, the anti-cancer agent is a cytotoxic virus. In another embodiment, the anti-cancer agent is a cytotoxic pathogen. In another embodiment, the anti-cancer agent is a nanosphere. In another embodiment, the nanosphere is loaded with a cytotoxic compound. In another embodiment, the nanosphere is loaded with a chemotherapy drug. In another embodiment, the nanosphere is loaded with a toxin. In another embodiment, the nanosphere is loaded with an anti-cancer compound. In another embodiment, the anti-cancer agent is a nanoparticle. In another embodiment, the anti-cancer agent is an engineered T cell. In another embodiment, the anti-cancer agent is an engineered cytotoxic cell. In another embodiment, the anti-cancer agent is any other type of engineered molecule known in the art. In another embodiment, the anti-cancer agent is any other agent used in cancer therapy. In another embodiment, the anti-cancer agent is any other type of anti-cancer agent known in the art. Each possibility represents a separate embodiment of the present invention.

[0176] “Engineered T cell” refers, in another embodiment, to a T cell designed to recognize a cell containing or expressing a molecule of interest. In another embodiment, the molecule of interest is a TVM of the present invention. In another embodiment, the term refers to a T cell with redirected specificity (T-bodies) for a TVM. In another embodiment, an engineered T cell of the present invention expresses a ligand that binds to or interacts with a TVM. In another embodiment, the engineered T cell exhibits specific activity against a TVC.

[0177] In another embodiment, an engineered T cell of the present invention expresses a chimeric immunoreceptor (CIR) directed against a TVM. In another embodiment, the CIR contains a bi-partite signaling module. In another embodiment, the extracellular module of the CIR is a single chain variable fragment (scFv) antibody that binds or interacts with a TVM. In another embodiment, the intracellular module of the CIR contains a costimulatory domain. In another embodiment, the costimulatory domain is a 4-1BB domain. In another embodiment, the costimulatory domain is a TCRζ domain. In another embodiment, the CIR contains both a 4-1BB domain and a TCRζ domain.

[0178] In another embodiment, an engineered T cell of the present invention is expanded in culture. In another embodiment, an engineered T cell of the present invention is activated in culture.

[0179] Each type of engineered T cell represents a separate embodiment of the present invention.

[0180] “Cytotoxic virus” refers, in another embodiment, to a virus capable of lysing a cell. In another embodiment, the term refers to a virus capable of lysing a tumor cell. In another embodiment, the virus is a recombinant virus that has been engineered to exhibit a characteristic favorable for anti-tumor activity. In another embodiment, the virus is wild-type, other than is conjugation to an antibody or ligand of the present invention. In another embodiment, the virus is an attenuated virus. Each possibility represents a separate embodiment of the present invention.

[0181] In another embodiment, the cytotoxic agent or anti-tumor agent is concentrated in the solid tumor. In another embodiment, the cytotoxic agent or anti-tumor agent is targeted to the solid tumor. In another embodiment, concentration of the cytotoxic agent or anti-tumor agent induces cytotoxicity in a tumor cell of the solid tumor. Each possibility represents a separate embodiment of the present invention.

[0182] In another embodiment, the present invention provides a method of impeding a vascularization of a solid tumor, the method comprising the step of contacting the subject with a ligand capable of binding to or inhibiting an activity of a nucleic acid molecule, the nucleic acid molecule encoding a protein selected from a DEFB1 protein, an EPB41L3 protein, a F2RL1 protein, a GPM6B protein, a SPON1 protein, and a STC2 protein, whereby the ligand is taken up by a vasculature cell of the solid tumor, thereby impeding a vascularization of a solid tumor.

[0183] In another embodiment, the present invention provides a method of impeding a vascularization of a solid tumor, the method comprising the step of contacting the subject with an antibody or ligand that binds to or inhibits an activity of a protein selected from a DEFB1 protein, an EPB41L3 protein, a F2RL1 protein, a GPM6B protein, a SPON1 protein, and a STC2 protein, whereby the ligand inhibits an activity of a vasculature cell of the solid tumor, thereby impeding a vascularization of a solid tumor.

[0184] In another embodiment, the present invention provides a method of impeding a vascularization of a solid tumor, the method comprising the step of contacting the subject with a ligand capable of binding to or inhibiting an activity of a nucleic acid molecule, the nucleic acid molecule encoding a protein selected from an AML-1 protein and an LZTS1 protein, whereby the ligand is taken up by a vasculature cell of the solid tumor, thereby impeding a vascularization of a solid tumor.

[0185] In another embodiment, the present invention provides a method of impeding a vascularization of a solid tumor, the method comprising the step of contacting the subject with an antibody or ligand that binds to or inhibits an activity of a protein selected from an AML-1 protein and an LZTS1 protein, whereby the ligand inhibits an activity of a vasculature cell of the solid tumor, thereby impeding a vascularization of a solid tumor.

[0186] In another embodiment, the present invention provides a method of impeding a vascularization of a solid tumor, the method comprising the step of contacting the subject with a ligand capable of binding to or inhibiting an activity of a nucleic acid molecule, the nucleic acid molecule encoding a protein selected from FAD104; WARP; BCAP29; CDH1; FLJ10826; OPN3; HIATL2; IL28RA; TMEM19; C10orf69; FRAP1; CKLFSF6; MPHOSPH9; CLST11240; SGPP2; SLCO3A1; DKFZp56411922; CALM3; MGC34647; MUC1; SLC30A6; TLCD1; SPTB; FNDC3; SPRY1; MME; INSR; LPPR4; C14orf100; SLC9A5; SCGB2A1; FLT1; MOBK1B; TMEM2; TMEM8; SLC5A4; MEST; CHODL; TRIO; IL10RA; LGALS3BP; STK4; ERBB3; C14orf28; KIAA1024; KIAA1906; F3; PCDHB2; KIAA0703; C1orf10; POLYDOM; TUBAL3; IL7R; ARHGAP18; GRM1; PREX1; MUC3A; and UBE2J1, whereby the ligand is taken up by a vasculature cell of the solid tumor, thereby impeding a vascularization of a solid tumor.

[0187] In another embodiment, the present invention provides a method of impeding a vascularization of a solid tumor, the method comprising the step of contacting the subject with an antibody or ligand that binds to or inhibits an activity of a protein selected from FAD104; WARP; BCAP29; CDH1; FLJ10826; OPN3; HIATL2; IL28RA; TMEM19; C10orf69; FRAP1; CKLFSF6; MPHOSPH9; CLST11240; SGPP2; SLCO3A1; DKFZp56411922; CALM3; MGC34647; MUC1; SLC30A6; TLCD1; SPTB; FNDC3; SPRY1; MME; INSR; LPPR4; C14orf100; SLC9A5; SCGB2A1; FLT1; MOBK1B; TMEM2; TMEM8; SLC5A4; MEST; CHODL; TRIO; IL10RA; LGALS3BP; STK4; ERBB3; C14orf28; KIAA1024; KIAA1906; F3; PCDHB2; KIAA0703; C1orf10; POLYDOM; TUBAL3; IL7R; ARHGAP18; GRM1; PREX1; MUC3A; and UBE2J1, whereby the ligand inhibits an activity of a vasculature cell of the solid tumor, thereby impeding a vascularization of a solid tumor.

[0188] In another embodiment, the present invention provides a method of impeding an angiogenesis in a subject, the method comprising the step of contacting the subject with a ligand capable of binding to a nucleic acid molecule, wherein the nucleic acid molecule is a TVM of the present invention, whereby the ligand is taken up by a vasculature cell of the solid tumor or a precursor of the vasculature cell, thereby impeding an angiogenesis in a subject.

[0189] In another embodiment, the present invention provides a method of impeding an angiogenesis in a subject, the method comprising the step of contacting the subject with an antibody or ligand that binds to a protein that is a TVM of the present invention, whereby the ligand inhibits an activity of a vasculature cell of the solid tumor or a precursor of the vasculature cell, thereby impeding an angiogenesis in a subject.

[0190] “Vasculature cell” refers, in another embodiment, to a cell capable of forming a tumor vasculature. In another embodiment, the term refers to a cell of a tumor vasculature. In another embodiment, “precursor of the vasculature cell” refers to a cell capable of differentiating into a cell capable of forming a tumor vasculature. In another embodiment, the term refers to a cell capable of differentiating into a cell of a tumor vasculature. Each possibility represents a separate embodiment of the present invention.

[0191] “Activity” refers, in another embodiment, to an angiogenic activity. In another embodiment, the term refers to production of a protein of the present invention. In another embodiment, the term refers to any other tumorigenic activity known in the art. Each possibility represents a separate embodiment of the present invention.

[0192] In another embodiment, the ligand reduces the expression of the nucleic acid to which it binds, or the expression of the protein encoded by the nucleic acid. In another embodiment, the ligand reduces the activity of the protein to which it binds. In another embodiment, binding to the ligand results in degradation of the nucleic acid molecule or protein to which it binds. In another embodiment, the ligand antagonizes the nucleic acid molecule or protein to which it binds via any other mechanism known in the art. Each possibility represents a separate embodiment of the present invention.

[0193] As provided herein, certain TVM of the present invention are up-regulated upon differentiation of precursor cells into TVC. Thus, these TVM (both the nucleic acid molecules and the proteins encoded thereby) play important roles in the function of TVC in angiogenesis, and thus in the pathogenesis of solid tumors. Accordingly, targeting the expression or activity of the nucleic acids and proteins represents an efficacious means of impeding vascularization of solid tumors.

[0194] The ligand utilized in methods and compositions of the present invention is, in another embodiment, an antisense molecule. In another embodiment, the ligand is an RNA molecule. In another embodiment, the ligand is an inhibitory RNA (RNAi) molecule. In another embodiment, the RNA molecule is a short hairpin RNA (shRNA). In another embodiment, the RNA molecule is a small inhibitory RNA (siRNA). In another embodiment, the RNA molecule is a microRNA (miRNA). The use of siRNA and miRNA has been described, inter alia, in (Caudy A A et al, Genes & Devel 16: 2491-96 and references cited therein). In another embodiment, the RNA molecule is an anti-sense locked-nucleic acid (LNA) oligonucleotide. In another embodiment, the RNA molecule is any type of inhibitory RNA enumerated or described in Banan M et al (The ins and outs of RNAi in mammalian cells. Curr Pharm Biotechnol. 2004 October; 5(5):441-50. In another embodiment, the RNA molecule is any type of RNAi known in the art.

[0195] In another embodiment, an RNA molecule utilized in methods of the present invention comprises a string of at least two base-sugar-phosphate combinations. The term includes, in another embodiment, compounds comprising nucleotides in which the sugar moiety is ribose. In another embodiment, the term includes both RNA and RNA derivates in which the backbone is modified. “Nucleotides” refers, in one embodiment, to the monomeric units of nucleic acid polymers. RNA may be, in another embodiment, in the form of a tRNA (transfer RNA), snRNA (small nuclear RNA), rRNA (ribosomal RNA), mRNA (messenger RNA), and ribozymes. In addition, these forms of RNA may be single, double, triple, or quadruple stranded. The term also includes, in another embodiment, artificial nucleic acids that may contain other types of backbones but the same bases. In one embodiment, the artificial nucleic acid is a PNA (peptide nucleic acid). PNA contain peptide backbones and nucleotide bases and are able to bind, in one embodiment, to both DNA and RNA molecules. In another embodiment, the nucleotide is oxetane modified. In another embodiment, the nucleotide is modified by replacement of one or more phosphodiester bonds with a phosphorothioate bond. In another embodiment, the artificial nucleic acid contains any other variant of the phosphate backbone of native nucleic acids known in the art. The use of phosphothiorate nucleic acids and PNA are known to those skilled in the art, and are described in, for example, Neilsen P E (Curr Opin Struct Biol 9:353-57); and Raz N K et al (Biochem Biophys Res Commun. 297:1075-84). The production and use of nucleic acids is known to those skilled in art and is described, for example, in Molecular Cloning, (2001), Sambrook and Russell, eds. and Methods in Enzymology: Methods for molecular cloning in eukaryotic cells (2003) Purchio and G. C. Fareed. Each nucleic acid derivative represents a separate embodiment of the present invention.

[0196] In another embodiment, the ligand induces degradation of the target nucleic acid molecule. In another embodiment, the ligand inhibits transcription of the nucleic acid molecule. In another embodiment, the ligand kills the TVC. In another embodiment, the ligand induces apoptosis of the TVC. In another embodiment, the ligand induces necrosis of the TVC. In another embodiment, the ligand inhibits proliferation of the TVC. In another embodiment, the ligand inhibits division of the TVC. In another embodiment, the ligand inhibits growth of the solid tumor. In another embodiment, the ligand induces regression of the solid tumor. Each possibility represents a separate embodiment of the present invention.

[0197] The activity of a vasculature cell that is inhibited by methods of the present invention, is, another embodiment, a catalytic activity. In another embodiment, the activity is interaction with another cell. In another embodiment, the activity is cell-cell adhesion. In another embodiment, the activity is contact repulsion. In another embodiment, the activity is DNA binding. In another embodiment, the activity is transcriptional regulation. In another embodiment, the activity is cartilage condensation. In another embodiment, the activity is protein binding. In another embodiment, the activity is extracellular structure organization and/or biogenesis. In another embodiment, the activity is phosphate transport. In another embodiment, the activity is G-protein coupled receptor protein signaling. In another embodiment, the activity is intracellular calcium signaling. In another embodiment, the activity is rhodopsin-like receptor activity. In another embodiment, the activity is thrombin receptor activity. In another embodiment, the activity is cell cycle modulation. In another embodiment, the activity is cell cycle inhibition. In another embodiment, the activity is cell surface receptor-linked signal transduction. In another embodiment, the activity is inflammatory signaling. In another embodiment, the activity is anti-inflammatory signaling. In another embodiment, the activity is hyaluronic acid binding. In another embodiment, the activity is any other activity performed by a protein encoded by a nucleic acid molecule having a sequence selected from the sequences set forth in SEQ ID No: 2, 5, 21, 25, 29, 36-38, 44, 58, 60, 62, and 68-69. Each possibility represents a separate embodiment of the present invention.

[0198] In another embodiment, the present invention provides a method of determining a stage of a solid tumor in a subject, the method comprising the steps of (a) contacting the subject with a ligand capable of binding to a nucleic acid molecule, the nucleic acid molecule encoding a protein selected from an Adlican protein, a COL11A1 protein, a DEFB1 protein, an EPB41L3 protein, a F2RL1 protein, an FZD10 protein, a GPM6B protein, a BLAME protein, a SPON1 protein, a STC2 protein, a TNFAIP6 protein, and a TNFRSF21 protein; (b) imaging the ligand in the subject, whereby if the ligand is concentrated in the solid tumor, then the solid tumor has a tumor vasculature.

[0199] As provided herein, TVM of the present invention are upregulated upon differentiation to TVC, both in vitro and in vivo (Examples 6-7), showing that expression levels of these proteins, and nucleotides encoding same can be used to determine the sate of a solid tumor.

[0200] In another embodiment, the present invention provides a method of determining a stage of a solid tumor, the method comprising the steps of (a) contacting the solid tumor with a ligand capable of binding to a protein selected from an Adlican protein, a COL11A1 protein, a DEFB1 protein, an EPB41L3 protein, a F2RL1 protein, an FZD10 protein, a GPM6B protein, a BLAME protein, a SPON1 protein, a STC2 protein, a TNFAIP6 protein, and a TNFRSF21 protein; (b) imaging the ligand in the subject, whereby if the ligand is concentrated in the solid tumor, then the solid tumor has a tumor vasculature.

[0201] In another embodiment, the present invention provides a method of determining a stage of a solid tumor, the method comprising the steps of (a) contacting the solid tumor with a ligand capable of binding to a nucleic acid molecule, the nucleic acid molecule encoding a protein selected from an AML-1 protein and an LZTS1 protein; (b) imaging the ligand in the subject. In another embodiment if the ligand is concentrated in the solid tumor, then the solid tumor has a tumor vasculature. In another embodiment, the solid tumor is forming a tumor vasculature. In another embodiment, the solid tumor is committed to forming a tumor vasculature. Each possibility represents a separate embodiment of the present invention.

[0202] In another embodiment, the present invention provides a method of determining a stage of a solid tumor, the method comprising the steps of (a) contacting the solid tumor with a ligand capable of binding to a protein selected from an AML-1 protein and an LZTS1 protein; (b) imaging the ligand in the subject. In another embodiment if the ligand is concentrated in the solid tumor, then the solid tumor has a tumor vasculature. In another embodiment, the solid tumor is forming a tumor vasculature. In another embodiment, the solid tumor is committed to forming a tumor vasculature. Each possibility represents a separate embodiment of the present invention.

[0203] In another embodiment, the present invention provides a method of determining a stage of a solid tumor, the method comprising the steps of (a) contacting the solid tumor with a ligand capable of binding to a nucleic acid molecule, the nucleic acid molecule encoding a protein selected from FAD104; WARP; BCAP29; CDH1; FLJ10826; OPN3; HIATL2; IL28RA; TMEM19; C10orf69; FRAP1; CKLFSF6; MPHOSPH9; CLST11240; MS4A6A; SGPP2; SLC11A1; SLCO3A1; LOC51136; DKFZp56411922; KCNE3; CALM3; KCNE4; MGC34647; MUC1; SDC1; SLC30A6; ST14; CDCP1; TLCD1; SPTB; FNDC3; SPRY1; MME; INSR; LPPR4; C14orf100; SLC9A5; SCGB2A1; FLT1; MOBK1B; TMEM2; TMEM8; SLC5A4; MEST; CHODL; TRIO; IL10RA; LGALS3BP; STK4; ERBB3; C14orf28; KIAA1024; KIAA1906; F3; PCDHB2; KIAA 703; C1orf10; POLYDOM; TUBAL3; GPR105; IL7R; ARHGAP18; GRM1; PREX1; MUC3A; EPSTI1; and UBE2J1; (b) imaging the ligand in the subject, whereby if the ligand is concentrated in the solid tumor, then the solid tumor has a tumor vasculature.

[0204] In another embodiment, the present invention provides a method of determining a stage of a solid tumor, the method comprising the steps of (a) contacting the solid tumor with a ligand capable of binding to a protein selected from FAD104; WARP; BCAP29; CDH1; FLJ10826; OPN3; HIATL2; IL28RA; TMEM19; C10orf69; FRAP1; CKLFSF6; MPHOSPH9; CLST11240; MS4A6A; SGPP2; SLC11A1; SLCO3A1; LOC51136; DKFZp56411922; KCNE3; CALM3; KCNE4; MGC34647; MUC1; SDC1; SLC30A6; ST14; CDCP1; TLCD1; SPTB; FNDC3; SPRY1; MME; INSR; LPPR4; C14orf100; SLC9A5; SCGB2A1; FLT1; MOBK1B; TMEM2; TMEM8; SLC5A4; MEST; CHODL; TRIO; IL10RA; LGALS3BP; STK4; ERBB3; C14orf28; KIAA1024; KIAA1906; F3; PCDHB2; KIAA0703; C1orf10; POLYDOM; TUBAL3; GPR105; IL7R; ARHGAP18; GRM1; PREX1; MUC3A; EPSTI1; and UBE2J1; (b) imaging the ligand in the subject, whereby if the ligand is concentrated in the solid tumor, then the solid tumor has a tumor vasculature.

[0205] In another embodiment, the present invention provides a method of localizing or detecting a presence of a TEC (Tumor Endothelial Cell) in a subject, the method comprising the steps of (a) contacting the subject with a ligand that binds to a nucleic acid molecule, the nucleic acid molecule encoding a protein selected from an Adlican protein; an EGF-like-domain, multiple 6 (EGFL6) protein; a Frizzled 10 (FZD10) protein; a Glycoprotein M6B (GPM6B) protein; and a Spondin 1 (SPON-1) protein; and (b) imaging the ligand in the subject, whereby, if the ligand is concentrated in an area of a tissue of the subject, then the subject has a TEC in the area.

[0206] In another embodiment, the present invention provides a method of detecting a presence of a solid tumor in a subject, the method comprising the step of detecting a presence in a body fluid of the subject of a protein selected from TNFAIP6; STC2; ESM1; IBSP; CKLFSF6; HAPLN1; WFDC2; SPP1; FLT1; LGALS3BP; CCL15; PLA2G2D; MUC3A; and LTBP2 (Latent transforming growth factor beta binding protein 2), wherein the presence in a body fluid of the subject of the protein indicates the presence of a solid tumor in the subject.

[0207] In another embodiment, the present invention provides a method of detecting a presence of a tumor vasculature cell in a subject, the method comprising the step of detecting a presence in a body fluid of the subject of a protein selected from TNFAIP6; STC2; ESM1; IBSP; CKLFSF6; HAPLN1; WFDC2; SPP1; FLT1; LGALS3BP; CCL15; PLA2G2D; MUC3A; and LTBP2, wherein the presence in a body fluid of the subject of the protein indicates the presence of a tumor vasculature cell in the subject.

[0208] In another embodiment, the present invention provides a method of detecting a presence of a solid tumor in a subject, the method comprising the step of detecting a presence in a body fluid of the subject of a nucleotide molecule encoding a protein selected from TNFAIP6 (Tumor necrosis factor, alpha-induced protein 6); STC2 (Stanniocalcin); ESM1 (Endothelial cell-specific molecule 1); IBSP (Integrin-binding sialoprotein); CKLFSF6 (CKLF-like MARVEL transmembrane domain containing 6); HAPLN1 (Hyaluronan and proteoglycan link protein 1); WFDC2 (WAP four-disulfide core domain 2); SPP1 (Secreted phosphoprotein 1 (osteopontin, bone sialoprotein I, early T-lymphocyte activation 1); FLT1 (Fms-related tyrosine kinase 1 (vascular endothelial growth factor/vascular permeability factor receptor); LGALS3BP (Lectin, galactoside-binding, soluble, 3 binding protein); CCL15 (chemokine (C-C motif) ligand 15); PLA2G2D (Phospholipase A2, group IID); MUC3A (Mucin 3A, intestinal); and LTBP2 (Latent transforming growth factor beta binding protein 2); wherein the presence in a body fluid of the subject of the nucleotide molecule indicates the presence of a solid tumor in the subject.

[0209] In another embodiment, the present invention provides a method of detecting a presence of a TVC in a subject, the method comprising the step of detecting a presence in a body fluid of the subject of a nucleotide molecule encoding a protein selected from TNFAIP6; STC2; ESM1; IBSP; CKLFSF6; HAPLN1; WFDC2; SPP1; FLT1; LGALS3BP; CCL15; PLA2G2D; MUC3A; and LTBP2; wherein the presence in a body fluid of the subject of the nucleotide molecule indicates the presence of a TVC in the subject.

[0210] In another embodiment, the present invention provides a method of detecting a presence of a solid tumor in a subject, the method comprising the step of detecting a presence in a body fluid of the subject of an Adlican protein, wherein the presence in a body fluid of the subject of the Adlican protein indicates the presence of a solid tumor in the subject.

[0211] In another embodiment, the present invention provides a method of detecting a presence of a tumor vasculature cell in a subject, the method comprising the step of detecting a presence in a body fluid of the subject of an Adlican protein, wherein the presence in a body fluid of the subject of the Adlican protein indicates the presence of a tumor vasculature cell in the subject.

[0212] In another embodiment, the present invention provides a method of detecting a presence of a solid tumor in a subject, the method comprising the step of detecting a presence in a body fluid of the subject of a nucleotide molecule encoding an Adlican protein, wherein the presence in a body fluid of the subject of the nucleotide molecule indicates the presence of a solid tumor in the subject.

[0213] In another embodiment, the present invention provides a method of detecting a presence of a tumor vasculature cell in a subject, the method comprising the step of detecting a presence in a body fluid of the subject of a nucleotide molecule encoding an Adlican protein, wherein the presence in a body fluid of the subject of the nucleotide molecule indicates the presence of a tumor vasculature cell in the subject.

[0214] In another embodiment, the present invention provides a peptide having the amino acid sequence CPGAKALSRVREDIVEDE (SEQ ID No: 88). In another embodiment, the sequence of the peptide consists of SEQ ID No: 88. Each possibility represents a separate embodiment of the present invention.

[0215] In another embodiment, the present invention provides an antibody that recognizes a peptide of the present invention. In another embodiment, the present invention provides an antibody that binds to a peptide of the present invention. In another embodiment, the present invention provides an antibody raised against a peptide of the present invention. Each possibility represents a separate embodiment of the present invention.

[0216] In another embodiment, the present invention provides the use of the peptide of the present invention in the detection of a solid tumor or tumor vasculature.

[0217] In another embodiment, the present invention provides the use of the peptide of the present invention in the localization of a solid tumor or tumor vasculature.

[0218] In another embodiment, the present invention provides the use of the peptide of the present invention in the treatment of a solid tumor or tumor vasculature.

[0219] As provided herein (Example 10), Adlican was detected in serum and ascites of patients with stage III ovarian cancer, but not control subjects. Thus, TVM of the present invention are efficacious for detection of tumors, by detecting their presence in bodily fluids of a subject. In another embodiment, a secreted TVM of the present invention is used. In another embodiment, a TVM of the present invention localized to the ECM is used. Each possibility represents a separate embodiment of the present invention.

[0220] “Presence in a body fluid” refers, in another embodiment, to a detectable presence. In another embodiment, the term refers to an amount that can be detected by a method used to for detection of proteins or antigens in body fluids. In another embodiment, the term refers to an amount that generates a signal over the background in a method used to for detection of proteins or antigens in body fluids.

[0221] In another embodiment, the method is ELISA. In another embodiment, the method is Western blot. In another embodiment, the method is any other method known in the art. Each possibility represents a separate embodiment of the present invention.

[0222] In another embodiment, the present invention provides a method of localizing or detecting a presence of a TEC (Tumor Endothelial Cell) in a subject, the method comprising the steps of (a) contacting the subject with a ligand that binds to a protein encoded by a nucleic acid molecule, the nucleic acid molecule encoding a protein selected from an Adlican protein; an EGFL6 protein, an FZD10 protein, a GPM6B protein, and a SPON-1 protein; and (b) imaging the ligand in the subject, whereby, if the ligand is concentrated in an area of a tissue of the subject, then the subject has a TEC in the area.

[0223] In another embodiment, the present invention provides a method of localizing or detecting a presence of a VLC (Vascular Leukocyte) in a subject, the method comprising the steps of (a) contacting the subject with a ligand that binds to a nucleic acid molecule that encodes a B lymphocyte activator macrophage expressed (BLAME) protein; and (b) imaging the ligand in the subject, whereby, if the ligand is concentrated in an area of a tissue of the subject, then the subject has a VLC in the area.

[0224] In another embodiment, the present invention provides a method of early diagnosis of a tumor, comprising a method of the present invention. In another embodiment, the present invention provides a method of early diagnosis of a cancer, comprising a method of the present invention. In another embodiment, the present invention provides a method of early diagnosis of a tumor, comprising contacting subject with a ligand that binds a TVM of the present invention. In another embodiment, the present invention provides a method of early diagnosis of a cancer, comprising contacting subject with a ligand that binds a TVM of the present invention. In another embodiment, the present invention provides a method of diagnosing or detecting a circulating TVC, comprising a method of the present invention. In another embodiment, the present invention provides a method of diagnosing or detecting a circulating TVC, comprising contacting subject with a ligand that binds a TVM of the present invention. Each possibility represents a separate embodiment of the present invention.

[0225] In another embodiment, one of the above methods utilizes a BLAME protein. As provided herein, BLAME is a marker for VLC of solid tumors and is an efficacious marker for localizing, detecting, and treating TVC and solid tumors.

[0226] In another embodiment, the present invention provides a method of inhibiting general angiogenesis, analogous to one of the above methods, comprising contacting a subject with a ligand that binds to EGFL6. In another embodiment, the present invention provides a method of detecting general angiogenesis, analogous to one of the above methods, comprising contacting a subject with a ligand that binds to EGFL6. In another embodiment, the present invention provides a method of inhibiting general angiogenesis, analogous to one of the above methods, comprising contacting a subject with a ligand that binds to OLFML2B. In another embodiment, the present invention provides a method of detecting general angiogenesis, analogous to one of the above methods, comprising contacting a subject with a ligand that binds to OLFML2B. As provided herein, EGFL6 and OLFML2B are markers of general angiogenesis.

[0227] In another embodiment, the present invention provides a method of localizing or detecting a presence of a VLC (Vascular Leukocyte) in a subject, the method comprising the steps of (a) contacting the subject with a ligand that binds to a BLAME protein; and (b) imaging the ligand in the subject, whereby, if the ligand is concentrated in an area of a tissue of the subject, then the subject has a VLC in the area.

[0228] The TVM, nucleic acid molecule, or protein encoded thereby that is detected, bound, inhibited, or targeted by a method of the present invention is, in another embodiment, in the target cell (e.g. the vasculature cell, solid tumor cell, or the like). In another embodiment, the nucleic acid molecule or protein is associated with the target cell. In another embodiment, the nucleic acid molecule or protein is expressed by the target cell. Each possibility represents a separate embodiment of the present invention.

[0229] In another embodiment, the present invention provides a method of treating a solid tumor in a subject, the method comprising the steps of localizing the solid tumor by a method of the present invention, and irradiating the solid tumor, thereby treating a solid tumor in a subject.

[0230] In another embodiment, the present invention provides a method of treating a solid tumor in a subject, the method comprising the steps of: (a) contacting the subject with a photo-activatable cytotoxic drug or pharmaceutical composition; (b) localizing the solid tumor by a method of the present invention; and (c) contacting the solid tumor with a concentrated light source, thereby treating a solid tumor in a subject.

[0231] In another embodiment, the present invention provides a method of treating an ovarian tumor in a subject, the method comprising the steps of localizing the ovarian tumor by a method of the present invention, and irradiating the ovarian tumor, thereby treating an ovarian tumor in a subject.

[0232] In another embodiment, the present invention provides a method of treating an ovarian tumor in a subject, the method comprising the steps of: (a) contacting the subject with a photo-activatable cytotoxic drug or pharmaceutical composition; (b) localizing the ovarian tumor by a method of the present invention; and (c) contacting the ovarian tumor with a concentrated light source, thereby treating an ovarian tumor in a subject.

[0233] In another embodiment, the present invention provides a method of treating a breast tumor in a subject, the method comprising the steps of localizing the breast tumor by a method of the present invention, and irradiating the breast tumor, thereby treating a breast tumor in a subject.

[0234] In another embodiment, the present invention provides a method of treating a breast tumor in a subject, the method comprising the steps of: (a) contacting the subject with a photo-activatable cytotoxic drug or pharmaceutical composition; (b) localizing the breast tumor by a method of the present invention; and (c) contacting the breast tumor with a concentrated light source, thereby treating a breast tumor in a subject.

[0235] In another embodiment, the present invention provides a method of treating a renal tumor in a subject, the method comprising the steps of localizing the renal tumor by a method of the present invention, and irradiating the renal tumor, thereby treating a renal tumor in a subject.

[0236] In another embodiment, the present invention provides a method of treating a renal tumor in a subject, the method comprising the steps of: (a) contacting the subject with a photo-activatable cytotoxic drug or pharmaceutical composition; (b) localizing the renal tumor by a method of the present invention; and (c) contacting the renal tumor with a concentrated light source, thereby treating a renal tumor in a subject.

[0237] Methods for isolation of VLC are well known in the art, and are described, for example, in Conejo-Garcia, J. R., Buckanovich, R. J., Benencia, F., Courreges, M. C., Rubin, S. C., Carroll, R. G. & Coukos, G. (2005) Blood 105: 679-81. In another embodiment, “VLC” refers to VE-cadherin⁺ CD146⁺CD45⁺ cells. In another embodiment, the term refers to human myeloid vascular cells with endothelial-like behavior.

[0238] In another embodiment, a VLC of the present invention is a precursor of a TEC of the present invention. In another embodiment, a VLC of the present invention is a separate lineage from of a TEC of the present invention. In another embodiment, VLC of the present invention cooperate with TEC of the present invention in neo-vessel formation. Each possibility represents a separate embodiment of the present invention.

[0239] In another embodiment, a TVM of the present invention is expressed by pericytes, in addition to TVC. In another embodiment, the TVM is expressed by a subset of pericytes. In another embodiment, the TVM is not expressed on pericytes.

[0240] A TVC of the present invention is, in another embodiment, an endothelial cell. In another embodiment, the TVC is a perivascular cell. In another embodiment, the TVC derives from a myeloid DC. In another embodiment, the TVC derives from a myeloid monocytic precursor. Each possibility represents a separate embodiment of the present invention.

[0241] In another embodiment, the present invention provides a method for isolation of a TVC, as exemplified in the Examples herein. Each method exemplified or described herein represents a separate embodiment of the present invention.

[0242] In another embodiment, a TVM of the present invention is particularly efficacious for treating, localizing, or diagnosing a particular tumor type. In another embodiment, a TVM of the present invention is efficacious for treating, localizing, or diagnosing multiple tumor types. In another embodiment, collagen 11α1 is particularly useful for breast tumors. In another embodiment, collagen 11α1 is particularly useful for lung tumors. In another embodiment, LZTS1 is particularly useful for melanoma. In another embodiment, LZTS1 is particularly useful for ovarian cancer. In another embodiment, FZD10 is particularly useful for ovarian tumors. In another embodiment, EMBPL1 is particularly useful for ovarian tumors. In another embodiment, BLAME is particularly useful for a tumor selected from ovarian, adrenal, and testis tumors. In another embodiment, ESM1 is particularly useful for a tumor selected from ovarian, adrenal, and renal tumors. In another embodiment, DSG2 is particularly useful for a tumor selected from colon and recto-sigmoid. In another embodiment, EPSTI1 is particularly useful for a tumor selected from adrenal and testes. In another embodiment, MS4A6A is particularly useful for a tumor selected from adrenal and testes. In another embodiment, LOC51136 is particularly useful for a tumor selected from adrenal, breast, and liver. In another embodiment, EGFL6 is particularly useful for a tumor selected from uterine corpus, lung and omentum. In another embodiment, KCNE3 is particularly useful for a tumor selected from recto-sigmoid, stomach, kidney, and adrenal. In another embodiment, KCNE4 is particularly useful for a tumor selected from breast, pancreas, and adrenal. In another embodiment, c14orf100 is particularly useful for adrenal tumors. In another embodiment, KCNK5 is particularly useful for a tumor selected from In another embodiment, BLAME is particularly useful for a tumor selected from recto-sigmoid and adrenal. In another embodiment, FZD10 is particularly useful for a corpus uteri malignancy. In another embodiment, ST14 is particularly useful for a tumor selected from colon, liver, recto-sigmoid, and adrenal. In another embodiment, PCDHB2 is particularly useful for a tumor selected from adrenal, brain, renal, lung, pancreas, and stomach. In another embodiment, OLFML2B is particularly useful for a tumor selected from adrenal and corpus uteri. In another embodiment, GPR105 is particularly useful for a tumor selected from stomach and testes. In another embodiment, IVNS1ABP is particularly useful for a tumor selected from adrenal, kidney, and testes. In another embodiment, SPP1 is particularly useful for a tumor selected from adrenal, kidney, and liver. In another embodiment, KIAA1892 is particularly useful for a testicular tumor. In another embodiment, C6orf69 is particularly useful for an adrenal malignancy. In another embodiment, KIBRA is particularly useful for a tumor selected from kidney and prostate. Each possibility represents a separate embodiment of the present invention.

[0243] In another embodiment, a TVM of the present invention has a sequence selected from the sequences set forth in SEQ ID No: 1-16, 18-23, 25-26, 28-32, 34-46, 48-58, 60-66, 68-70, and 85-211). In another embodiment, the TVM has an AA sequence encoded by a nucleotide sequence set forth in Table 6, or in a GenBank entry whose Accession Number appears therein. In another embodiment, the TVM has an AA sequence comprising a nucleotide sequence set forth in Table 6, or in a GenBank entry whose Accession Number appears therein. Each possibility represents a separate embodiment of the present invention.

[0244] The nucleic acid molecule that is targeted by methods of the present invention, has, in another embodiment, a sequence selected from the sequences set forth in SEQ ID No: 2, 21, 25, 29, 36-38, 58, 60, 62, and 68-69. In another embodiment, the nucleic acid molecule has a sequence selected from the sequences set forth in SEQ ID No: 2, 27, 37, 38, and 60. In another embodiment, the nucleic acid molecule has the sequence set forth in SEQ ID No: 58. Each possibility represents a separate embodiment of the present invention.

[0245] In another embodiment, the TVM has a sequence set forth in Table 6. In another embodiment, the TVM has a sequence comprising a sequence set forth in Table 6. In another embodiment, the TVM has a sequence comprising a partial gene sequence set forth in Table 6. In another embodiment, the TVM has a sequence comprising a partial transcript sequence set forth in Table 6. In another embodiment, the TVM has a sequence set forth in a GenBank entry whose Accession Number appears in Table 6. In another embodiment, the TVM has a sequence comprising a sequence set forth a GenBank entry whose Accession Number appears in Table 6. In another embodiment, the TVM has a sequence comprising a partial gene sequence set forth in a GenBank entry whose Accession Number appears in Table 6. In another embodiment, the TVM has a sequence comprising a partial transcript sequence set forth in a GenBank entry whose Accession Number appears in Table 6.

[0246] In another embodiment, the TVM has a sequence set forth in Table 7. In another embodiment, the TVM has a sequence comprising a sequence set forth in Table 7. In another embodiment, the TVM has a sequence comprising a partial gene sequence set forth in Table 7. In another embodiment, the TVM has a sequence comprising a partial transcript sequence set forth in Table 7. In another embodiment, the TVM has a sequence set forth in a GenBank entry whose Accession Number appears in Table 7. In another embodiment, the TVM has a sequence comprising a sequence set forth a GenBank entry whose Accession Number appears in Table 7. In another embodiment, the TVM has a sequence comprising a partial gene sequence set forth in a GenBank entry whose Accession Number appears in Table 7. In another embodiment, the TVM has a sequence comprising a partial transcript sequence set forth in a GenBank entry whose Accession Number appears in Table 7.

[0247] In another embodiment, a nucleic acid molecule of the present invention encodes a TVM. In another embodiment, the nucleic acid molecule is a TVM. Each possibility represents a separate embodiment of the present invention.

[0248] The protein that is targeted by methods of the present invention, is, in another embodiment, encoded by a nucleic acid molecule having a sequence selected from the sequences set forth in SEQ ID No: 2, 5, 21, 25, 29, 36-38, 44, 58, 60, 62, and 68-69. In another embodiment, the protein is encoded by a nucleic acid molecule having a sequence selected from the sequences set forth in SEQ ID No: 2, 27, 37, 38, and 60. In another embodiment, the protein is encoded by a nucleic acid molecule having the sequence set forth in SEQ ID No: 58. In another embodiment, the protein is a tumor vasculature marker. In another embodiment, the protein has one of the sequences set forth below. Each possibility represents a separate embodiment of the present invention.

[0249] In another embodiment, the tumor vasculature marker (TVM) is an Adlican protein. In another embodiment, the marker is a nucleic acid molecule encoding an Adlican protein. In another embodiment, the Adlican protein is encoded by a nucleic acid molecule having the sequence set forth in SEQ ID No: 2. In another embodiment, the Adlican protein is encoded by a nucleic acid molecule having a sequence set forth in GenBank Accession No. AF245505. In another embodiment, the Adlican protein has an amino acid (AA) sequence set forth in GenBank Accession No. AF245505. In another embodiment, the Adlican protein is an MXRA5 protein. In another embodiment, the Adlican protein is encoded by any other Adlican gene sequence known in the art. In another embodiment, the Adlican protein is any other Adlican protein known in the art. In another embodiment, the TVM is an isoform of an Adlican protein. In another embodiment, the TVM is a homologue of an Adlican protein. In another embodiment, the TVM is a variant of an Adlican protein. In another embodiment, the TVM is a fragment of an Adlican protein. In another embodiment, the TVM is a fragment of an isoform, homologue, or variant of an Adlican protein. Each possibility represents a separate embodiment of the present invention.

[0250] In another embodiment, the TVM is an AML1 protein. In another embodiment, the marker is a nucleic acid molecule encoding an AML1 protein. In another embodiment, the AML1 protein is encoded by a nucleic acid molecule having the sequence set forth in SEQ ID No: 5. In another embodiment, the AML1 protein is encoded by a nucleic acid molecule having a sequence set forth in GenBank Accession No. NM_{—}001001890. In another embodiment, the AML1 protein is encoded by a nucleic acid molecule having a sequence selected from those set forth in GenBank Accession No. NM_{—}001754 and NM_{—}001987. In another embodiment, the AML1 protein has an AA sequence set forth in one of the above GenBank entries. In another embodiment, the AML1 protein is encoded by a nucleic acid molecule comprising a sequence set forth in DQ224380, DQ224379, DQ224378, DQ207762, DQ207763, DQ207764, DQ207765, DQ207766, DQ207767, DQ207768, DQ207769, DQ207770, DQ100455, DQ100456, DQ100457, AJ888032, AJ888033, AJ888034, AJ888035, AJ888036, AJ888037, AJ888038, AJ888039, AJ888040, or AJ888041. In another embodiment, the AML1 protein has an AA sequence comprising an AA sequence set forth in one of the above GenBank entries. In another embodiment, the AML1 protein is encoded by any other AML1 gene sequence known in the art. In another embodiment, the AML1 protein is any other AML1 protein known in the art. In another embodiment, the TVM is an isoform of an AML1 protein. In another embodiment, the TVM is a homologue of an AML1 protein. In another embodiment, the TVM is a variant of an AML1 protein. In another embodiment, a TEL/AML1 protein is utilized in methods and compositions of the present invention. In another embodiment, the TEL/AML1 protein is encoded by any TEL/AML1 gene sequence known in the art. In another embodiment, the TEL/AML1 protein is any TEL/AML1 protein known in the art. In another embodiment, the TVM is an isoform of a TEL/AML1 protein. In another embodiment, the TVM is a homologue of a TEL/AML1 protein. In another embodiment, an ETV6/RUNX1 protein is utilized in methods and compositions of the present invention. In another embodiment, the ETV6/RUNX1 protein is encoded by any ETV6/RUNX1 gene sequence known in the art. In another embodiment, the ETV6/RUNX1 protein is any ETV6/RUNX1 protein known in the art In another embodiment, the TVM is an isoform of an ETV6/RUNX1 protein. In another embodiment, the TVM is a homologue of an ETV6/RUNX1 protein. In another embodiment, the TVM is a fragment of an AML1, TEL/AML1, or ETV6/RUNX1 protein. In another embodiment, the TVM is a fragment of an isoform, homologue, or variant of an AML1, TEL/AML1, or ETV6/RUNX1 protein. Each possibility represents another embodiment of the present invention.

[0251] In another embodiment, the TVM is a COL11A1 protein. In another embodiment, the marker is a nucleic acid molecule encoding a COL11A1 protein. In another embodiment, the COL11A1 protein is encoded by a nucleic acid molecule having the sequence set forth in SEQ ID No: 21. In another embodiment, the COL11A1 protein is encoded by a nucleic acid molecule with the following sequence:

(SEQ ID No: 21)

acacagtactctcagcttgttggtggaagcccctcatctgccttcattct
gaaggcagggcccggcagaggaaggatcagagggtcgcggccggagggtc
ccggccggtggggccaactcagagggagaggaaagggctagagacacgaa
gaacgcaaaccatcaaatttagaagaaaaagccctttgactttttccccc
tctccctccccaatggctgtgtagcaaacatccctggcgataccttggaa
aggacgaagttggtctgcagtcgcaatttcgtgggttgagttcacagttg
tgagtgcggggctcggagatggagccgtggtcctctaggtggaaaacgaa
acggtggctctgggatttcaccgtaacaaccctcgcattgaccttcctct
tccaagctagagaggtcagaggagctgctccagttgatgtactaaaagca
ctagattttcacaattctccagagggaatatcaaaaacaacgggattttg
cacaaacagaaagaattctaaaggctcagatactgcttacagagtttcaa
agcaagcacaactcagtgccccaacaaaacagttatttccaggtggaact
ttcccagaagacttttcaatactatttacagtaaaaccaaaaaaaggaat
tcagtctttccttttatctatatataatgagcatggtattcagcaaattg
gtgttgaggttgggagatcacctgtttttctgtttgaagaccacactgga
aaacctgccccagaagactatcccctcttcagaactgttaacatcgctga
cgggaagtggcatcgggtagcaatcagcgtggagaagaaaactgtgacaa
tgattgttgattgtaagaagaaaaccacgaaaccacttgatagaagtgag
agagcaattgttgataccaatggaatcacggtttttggaacaaggatttt
ggatgaagaagtttttgagggggacattcagcagtttttgatcacaggtg
atcccaaggcagcatatgactactgtgagcattatagtccagactgtgac
tcttcagcacccaaggctgctcaagctcaggaacctcagatagatgagta
tgcaccagaggatataatcgaatatgactatgagtatggggaagcagagt
ataaagaggctgaaagtgtaacagagggacccactgtaactgaggagaca
atagcacagacggaggcaaacatcgttgatgattttcaagaatacaacta
tggaacaatggaaagttaccagacagaagctcctaggcatgtttctggga
caaatgagccaaatccagttgaagaaatatttactgaagaatatctaacg
ggagaggattatgattcccagaggaaaaattctgaggatacactatatga
aaacaaagaaatagacggcagggattctgatcttctggtagatggagatt
taggcgaatatgatttttatgaatataaagaatatgaagataaaccaaca
agcccccctaatgaagaatttggtccaggtgtaccagcagaaactgatat
tacagaaacaagcataaatggccatggtgcatatggagagaaaggacaga
aaggagaaccagcagtggttgagcctggtatgcttgtcgaaggaccacca
ggaccagcaggacctgcaggtattatgggtcctccaggtctacaaggccc
cactggaccccctggtgaccctggcgataggggccccccaggacgtcctg
gcttaccaggggctgatggtctacctggtcctcctggtactatgttgatg
ttaccgttccgttatggtggtgatggttccaaaggaccaaccatctctgc
tcaggaagctcaggctcaagctattcttcagcaggctcggattgctctga
gaggcccacctggcccaatgggtctaactggaagaccaggtcctgtgggg
gggcctggttcatctggggccaaaggtgagagtggtgatccaggtcctca
gggccctcgaggcgtccagggtccccctggtccaacgggaaaacctggaa
aaaggggtcgtccaggtgcagatggaggaagaggaatgccaggagaacct
ggggcaaagggagatcgagggtttgatggacttccgggtctgccaggtga
caaaggtcacaggggtgaacgaggtcctcaaggtcctccaggtcctcctg
gtgatgatggaatgaggggagaagatggagaaattggaccaagaggtctt
ccaggtgaagctggcccacgaggtttgctgggtccaaggggaactccagg
agctccagggcagcctggtatggcaggtgtagatggccccccaggaccaa
aagggaacatgggtccccaaggggagcctgggcctccaggtcaacaaggg
aatccaggacctcagggtcttcctggtccacaaggtccaattggtcctcc
tggtgaaaaaggaccacaaggaaaaccaggacttgctggacttcctggtg
ctgatgggcctcctggtcatcctgggaaagaaggccagtctggagaaaag
ggggctctgggtccccctggtccacaaggtcctattggatacccgggccc
ccggggagtaaagggagcagatggtgtcagaggtctcaagggatctaaag
gtgaaaagggtgaagatggttttccaggattcaaaggtgacatgggtcta
aaaggtgacagaggagaagttggtcaaattggcccaagaggggaagatgg
ccctgaaggacccaaaggtcgagcaggcccaactggagacccaggtcctt
caggtcaagcaggagaaaagggaaaacttggagttccaggattaccagga
tatccaggaagacaaggtccaaagggttccactggattccctgggtttcc
aggtgccaatggagagaaaggtgcacggggagtagctggcaaaccaggcc
ctcggggtcagcgtggtccaacgggtcctcgaggttcaagaggtgcaaga
ggtcccactgggaaacctgggccaaagggcacttcaggtggcgatggccc
tcctggccctccaggtgaaagaggtcctcaaggacctcagggtccagttg
gattccctggaccaaaaggccctcctggaccacctgggaaggatgggctg
ccaggacaccctgggcaacgtggggagactggatttcaaggcaagaccgg
ccctcctgggccagggggagtggttggaccacagggaccaaccggtgaga
ctggtccaataggggaacgtgggcatcctggccctcctggccctcctggt
gagcaaggtcttcctggtgctgcaggaaaagaaggtgcaaagggtgatcc
aggtcctcaaggtatctcagggaaagatggaccagcaggattacgtggtt
tcccaggggaaagaggtcttcctggagctcagggtgcacctggactgaaa
ggaggggaaggtccccagggcccaccaggtccagttggctcaccaggaga
acgtgggtcagcaggtacagctggcccaattggtttaccagggcgcccgg
gacctcagggtcctcctggtccagctggagagaaaggtgctcctggagaa
aaaggtccccaagggcctgcagggagagatggagttcaaggtcctgttgg
tctcccagggccagctggtcctgccggctcccctggggaagacggagaca
agggtgaaattggtgagccgggacaaaaaggcagcaagggtgacaaggga
gaaaatggccctcccggtcccccaggtcttcaaggaccagttggtgcccc
tggaattgctggaggtgatggtgaaccaggtcctagaggacagcagggga
tgtttgggcaaaaaggtgatgagggtgccagaggcttccctggacctcct
ggtccaataggtcttcagggtctgccaggcccacctggtgaaaaaggtga
aaatggggatgttggtcccatggggccacctggtcctccaggcccaagag
gccctcaaggtcccaatggagctgatggaccacaaggacccccagggtct
gttggttcagttggtggtgttggagaaaagggtgaacctggagaagcagg
gaacccagggcctcctggggaagcaggtgtaggcggtcccaaaggagaaa
gaggagagaaaggggaagctggtccacctggagctgctggacctccaggt
gccaaggggccaccaggtgatgatggccctaagggtaacccgggtcctgt
tggttttcctggagatcctggtcctcctggggaacctggccctgcaggtc
aagatggtgttggtggtgacaagggtgaagatggagatcctggtcaaccg
ggtcctcctggcccatctggtgaggctggcccaccaggtcctcctggaaa
acgaggtcctcctggagctgcaggtgcagagggaagacaaggtgaaaaag
gtgctaagggggaagcaggtgcagaaggtcctcctggaaaaaccggccca
gtcggtcctcagggacctgcaggaaagcctggtccagaaggtcttcgggg
catccctggtcctgtgggagaacaaggtctccctggagctgcaggccaag
atggaccacctggtcctatgggacctcctggcttacctggtctcaaaggt
gaccctggctccaagggtgaaaagggacatcctggtttaattggcctgat
tggtcctccaggagaacaaggggaaaaaggtgaccgagggctccctggaa
ctcaaggatctccaggagcaaaaggggatgggggaattcctggtcctgct
ggtcccttaggtccacctggtcctccaggtttaccaggtcctcaaggccc
aaagggtaacaaaggctctactggacccgctggccagaaaggtgacagtg
gtcttccagggcctcctgggtctccaggtccacctggtgaagtcattcag
cctttaccaatcttgtcctccaaaaaaacgagaagacatactgaaggcat
gcaagcagatgcagatgataatattcttgattactcggatggaatggaag
aaatatttggttccctcaattccctgaaacaagacattgagcatatgaaa
tttccaatgggtactcagaccaatccagcccgaacttgtaaagacctgca
actcagccatcctgacttcccagatggtgaatattggattgatcctaacc
aaggttgctcaggagattccttcaaagtttactgtaatttcacatctggt
ggtgagacttgcatttatccagacaaaaaatctgagggagtaagaatttc
atcatggccaaaggagaaaccaggaagttggtttagtgaatttaagaggg
gaaaactgctttcatacttagatgttgaaggaaattccatcaatatggtg
caaatgacattcctgaaacttctgactgcctctgctcggcaaaatttcac
ctaccactgtcatcagtcagcagcctggtatgatgtgtcatcaggaagtt
atgacaaagcacttcgcttcctgggatcaaatgatgaggagatgtcctat
gacaataatccttttatcaaaacactgtatgatggttgtgcgtccagaaa
aggctatgaaaagactgtcattgaaatcaatacaccaaaaattgatcaag
tacctattgttgatgtcatgatcaatgactttggtgatcagaatcagaag
ttcggatttgaagttggtcctgtttgttttcttggctaagattaagacaa
agaacatatcaaatcaacagaaaatataccttggtgccaccaacccattt
tgtgccacatgcaagttttgaataaggatggtatagaaaacaacgctgca
tatacaggtaccatttaggaaataccgatgcctttgtgggggcagaatca
catggcaaaagctttgaaaatcataaagatataagttggtgtggctaaga
tggaaacagggctgattcttgattcccaattctcaactctccttttccta
tttgaatttctttggtgctgtagaaaacaaaaaaagaaaaatatatattc
ataaaaaatatggtgctcattctcatccatccaggatgtactaaaacagt
gtgtttaataaattgtaattattttgtgtacagttctatactgttatctg
tgtccatttccaaaacttgcacgtgtccctgaattccatctgactctaat
tttatgagaattgcagaactctgatggcaataaatatatgtattatgaaa
aaataaagttgtaatttctgatgactctaagtccctttctttgttaataa
taaaatgcctttgtatatattgatgttgaagagttcaattatttgatgtc
gccaacaaaattctcagagggcaaaaatctggaagacttttggaagcaca
ctctgatcaactcttctctgccgacagtcattttgctgaatttcagccaa
aaatattatgcattttgatgctttattcaaggctatacctcaaacttttt
cttctcagaatccaggatttcacaggatacttgtatatatggaaaacaag
caagtttatatttttggacagggaaatgtgtgtaagaaagtatattaaca
aatcaatgcctccgtcaagcaaacaatcatatgtatactttttttctacg
ttatctcatctccttgttttcagtgtgcttcaataatgcaggttaatatt
aaagatggaaattaagcaattatttatgaatttgtgcaatgttagatttt
cttatcaatcaagttcttgaatttgattctaagttgcatattataacagt
ctcgaaaattattttacttgcccaacaaatattacttttttcctttcaag
ataattttataaatcatttgacctacctaattgctaaatgaataacatat
ggtggactgttattaagagtatttgttttaagtcattcaggaaaatctaa
acttttttttccactaaggtatttactttaaggtagcttgaaatagcaat
acaatttaaaaattaaaaactgaattttgtatctattttaagtaatatat
gtaagacttgaaaataaatgttttatttcttatataaagtgttaaattaa
ttgataccagatttcactggaacagtttcaactgataatttatgacaaaa
gaacatacctgtaatattgaaattaaaaagtgaaatttgtcataaagaat
ttcttttatttttgaaatcgagtttgtaaatgtccttttaagaagggaga
tatgaatccaataaataaactcaagtcttggctacctgga.

[0252] In another embodiment, the COL11A1 protein is encoded by a nucleic acid molecule having a sequence set forth in GenBank Accession No. NM_{—}001854. In another embodiment, the COL11A1 protein is encoded by a nucleic acid molecule having a sequence selected from those set forth in GenBank Accession No. NM_{—}080629, NM_{—}080630, J04177, AB208844, and AB208844. In another embodiment, the COL11A1 protein has an AA sequence set forth in one of the above GenBank entries. In another embodiment, the COL11A1 protein has an AA sequence set forth in GenBank Accession No. NP_{—}542196, NP_{—}542197, AAA51891, or BAD92081. In another embodiment, the COL11A1 protein is encoded by a COL11A transcript variant A. In another embodiment, the COL11A1 protein is encoded by a COL11A transcript variant B. In another embodiment, the COL11A1 protein is encoded by a COL11A transcript variant C. In another embodiment, the COL11A1 protein is a COL11A isoform A. In another embodiment, the COL11A1 protein is a COL11A isoform B. In another embodiment, the COL11A1 protein is a COL11A isoform C. In another embodiment, the COL11A1 protein is encoded by any other COL11A1 gene sequence known in the art. In another embodiment, the COL11A1 protein is any other COL11A1 protein known in the art. In another embodiment, the TVM is an isoform of a COL11A1 protein. In another embodiment, the TVM is a homologue of a COL11A1 protein. In another embodiment, the TVM is a variant of a COL11A1 protein. In another embodiment, the TVM is a fragment of a COL11A1 protein. In another embodiment, the TVM is a fragment of an isoform, homologue, or variant of a COL11A1 protein. Each possibility represents another embodiment of the present invention.

[0253] In another embodiment, the TVM is a DEFB1 protein. In another embodiment, the marker is a nucleic acid molecule encoding a DEFB1 protein. In another embodiment, the DEFB1 protein is encoded by a nucleic acid molecule having the sequence set forth in SEQ ID No: 25. In another embodiment, the DEFB1 protein is encoded by a nucleic acid molecule having a sequence set forth in GenBank Accession No. BC033298. In another embodiment, the DEFB1 protein is encoded by a nucleic acid molecule having a sequence selected from those set forth in GenBank Accession No. BC047677, NM_{—}005218, U73945, Z50788, and X92744. In another embodiment, the DEFB1 protein has an AA sequence set forth in one of the above GenBank entries. In another embodiment, the DEFB1 protein has an AA sequence selected from the sequences set forth in GenBank Accession No. NP_{—}005209, AAH33298, AAH47677, CAA63405, and CAA90650. In another embodiment, the DEFB1 protein is encoded by any other DEFB1 gene sequence known in the art. In another embodiment, the DEFB1 protein is any other DEFB1 protein known in the art. In another embodiment, the TVM is an isoform of a DEFB1 protein. In another embodiment, the TVM is a homologue of a DEFB1 protein. In another embodiment, the TVM is a variant of a DEFB1 protein. In another embodiment, the TVM is a fragment of a DEFB1 protein. In another embodiment, the TVM is a fragment of an isoform, homologue, or variant of a DEFB1 protein. Each possibility represents another embodiment of the present invention.

[0254] In another embodiment, the TVM is an EPB41L3 protein. In another embodiment, the marker is a nucleic acid molecule encoding an EPB41L3 protein. In another embodiment, the TVM is a homologue of an EPB41L3 precursor protein. In another embodiment, the TVM is a variant of an EPB41L3 precursor protein. In another embodiment, the TVM is an isoform of an EPB41L3 precursor protein. In another embodiment, the TVM is a fragment of an EPB41L3 protein. In another embodiment, the TVM is a fragment of an isoform, homologue, or variant of an EPB41L3 protein. Each possibility represents another embodiment of the present invention.

[0255] In another embodiment, the TVM is an F2RL1 protein. In another embodiment, the marker is a nucleic acid molecule encoding an F2RL1 protein. In another embodiment, the F2RL1 protein is encoded by a nucleic acid molecule having the sequence set forth in SEQ ID No: 36. In another embodiment, the F2RL1 protein is encoded by a nucleic acid molecule having a sequence set forth in GenBank Accession No. BC012453. In another embodiment, the F2RL1 protein is encoded by a nucleic acid molecule having a sequence selected from those set forth in GenBank Accession No. BC018130, U34038, BC012453, BC018130, BT009856, AY336105, and NM_{—}005242. In another embodiment, the F2RL1 protein has an AA sequence set forth in one of the above GenBank entries. In another embodiment, the F2RL1 protein has an AA sequence selected from the sequences set forth in GenBank Accession No. NP_{—}005233, AAB47871, AAH12453, AAH18130, AAP88858, and AAP97012. In another embodiment, the F2RL1 protein is encoded by any other F2RL1 gene sequence known in the art. In another embodiment, the F2RL1 protein is any other F2RL1 protein known in the art. In another embodiment, the TVM is an isoform of an F2RL1 protein. In another embodiment, the TVM is a homologue of an F2RL1 protein. In another embodiment, the TVM is a variant of an F2RL1 protein. In another embodiment, a coagulation factor II (thrombin) receptor-like 1 (F2RL1) precursor protein is utilized in methods and compositions of the present invention. In another embodiment, the F2RL1 precursor protein is encoded by a gene having a sequence set forth in GenBank Accession No. NP_{—}005233. In another embodiment, the F2RL1 precursor protein is encoded by any F2RL1 precursor gene sequence known in the art. In another embodiment, the F2RL1 precursor protein is any F2RL1 precursor protein known in the art. In another embodiment, the TVM is an isoform of a F2RL1 precursor protein. In another embodiment, the TVM is a fragment of an F2RL1 protein or precursor thereof. In another embodiment, the TVM is a fragment of an isoform, homologue, or variant of an F2RL1 protein or precursor thereof. Each possibility represents another embodiment of the present invention.

[0256] In another embodiment, the TVM is a GPM6B protein. In another embodiment, the marker is a nucleic acid molecule encoding a GPM6B protein. In another embodiment, the GPM6B protein is encoded by a nucleic acid molecule having the sequence set forth in SEQ ID No: 38. In another embodiment, the GPM6B protein is encoded by a nucleic acid molecule having a sequence set forth in GenBank Accession No. BC008151. In another embodiment, the GPM6B protein is encoded by a nucleic acid molecule having a sequence selected from those set forth in GenBank Accession No. BC047295, NM_{—}005278, NM_{—}001001994, NM_{—}001001995, NM_{—}001001996, AK095657, AB209525, and U45955. In another embodiment, the GPM6B protein has an AA sequence set forth in one of the above GenBank entries. In another embodiment, the GPM6B protein has an AA sequence selected from the sequences set forth in GenBank Accession No. NP_{—}005269, AAH08151, BAC04600, BAD92762, and AAB16888. In another embodiment, the GPM6B protein is encoded by a transcript variant 1 of a GPM6B-encoding RNA. In another embodiment, the GPM6B protein is encoded by a transcript variant 2 of a GPM6B-encoding RNA. In another embodiment, the GPM6B protein is encoded by a transcript variant 3 of a GPM6B-encoding RNA. In another embodiment, the GPM6B protein is encoded by a transcript variant 4 of a GPM6B-encoding RNA. In another embodiment, the GPM6B protein is encoded by any other GPM6B gene sequence known in the art. In another embodiment, the GPM6B protein is a GPM6B isoform 1. In another embodiment, the GPM6B protein is a GPM6B isoform 2. In another embodiment, the GPM6B protein is an M6b-2. In another embodiment, the GPM6B protein is a GPM6B isoform 3. In another embodiment, the TVM is another isoform of a GPM6B protein. In another embodiment, the GPM6B protein is any other GPM6B protein known in the art. In another embodiment, the TVM is a homologue of a GPM6B protein. In another embodiment, the TVM is a variant of a GPM6B protein. In another embodiment, the TVM is a fragment of a GPM6B protein. In another embodiment, the TVM is a fragment of an isoform, homologue, or variant of a GPM6B protein. Each possibility represents another embodiment of the present invention.

[0257] In another embodiment, the TVM is an LZTS1 protein. In another embodiment, the marker is a nucleic acid molecule encoding a LZTS1 protein. In another embodiment, the LZTS1 protein is encoded by a nucleic acid molecule having the sequence set forth in SEQ ID No: 44. In another embodiment, the LZTS1 protein is encoded by a nucleic acid molecule having a sequence set forth in GenBank Accession No. NM_{—}021020. In another embodiment, the LZTS1 protein is encoded by a nucleic acid molecule having a sequence selected from those set forth in GenBank Accession No. AF123659, BC075006, AF123654, AF123655, AF123656, AF123657, AF123658, BC075006, BC075007, and BC075007. In another embodiment, the LZTS1 protein has an AA sequence set forth in one of the above GenBank entries. In another embodiment, the LZTS1 protein has an AA sequence selected from the sequences set forth in NP_{—}066300, AAD23833, AAD23835, AAD23836, AAD23837, AAD23838, AAD23839, AAD23840, AAH75006 and AAH75007. In another embodiment, the LZTS1 protein is encoded by any other LZTS1 gene sequence known in the art. In another embodiment, the LZTS1 protein is any other LZTS1 protein known in the art. In another embodiment, the TVM is an isoform of a LZTS1 protein. In another embodiment, the TVM is a homologue of a LZTS1 protein. In another embodiment, the TVM is a variant of a LZTS1 protein. In another embodiment, an E16T8 FEZ1 or a fasciculation and elongation protein zeta 1 (FEZ1) protein is utilized in methods and compositions of the present invention. In another embodiment, the FEZ1 protein is encoded by any FEZ1 gene sequence known in the art. In another embodiment, the FEZ1 protein is any FEZ1 protein known in the art. In another embodiment, the TVM is an isoform of a FEZ1 protein. In another embodiment, the TVM is a homologue of a FEZ1 protein. In another embodiment, a zygin I protein is utilized in methods and compositions of the present invention. In another embodiment, the zygin I protein is encoded by any zygin I gene sequence known in the art. In another embodiment, the zygin I protein is any zygin I protein known in the art. In another embodiment, the TVM is an isoform of a zygin I protein. In another embodiment, the TVM is a homologue of a zygin I protein. In another embodiment, a LAPSER1 protein is utilized in methods and compositions of the present invention. In another embodiment, the LAPSER1 protein is encoded by any LAPSER1 gene sequence known in the art. In another embodiment, the LAPSER1 protein is any LAPSER1 protein known in the art. In another embodiment, the TVM is an isoform of a LAPSER1 protein. In another embodiment, the TVM is a homologue of a LAPSER1 protein. In another embodiment, the TVM is a fragment of a LZTS1, FEZ1, zygin I, or LAPSER1 protein. In another embodiment, the TVM is a fragment of an isoform, homologue, or variant of a LZTS1, FEZ1, zygin I, or LAPSER1 protein. Each possibility represents another embodiment of the present invention.

[0258] In another embodiment, the TVM is a BLAME protein. In another embodiment, the marker is a nucleic acid molecule encoding a BLAME protein. In another embodiment, the BLAME protein is encoded by a nucleic acid molecule having the sequence set forth in SEQ ID No: 58. In another embodiment, the BLAME protein is encoded by a nucleic acid molecule having a sequence set forth in GenBank Accession No. AK074669. In another embodiment, the BLAME protein is encoded by a nucleic acid molecule having a sequence selected from those set forth in GenBank Accession No. BC109194, NM_{—}020125, AF144235, or AF146761. In another embodiment, the BLAME protein is encoded by a FLJ90188 cDNA. In another embodiment, the BLAME protein has an AA sequence set forth in one of the above GenBank entries. In another embodiment, the BLAME protein has an AA sequence selected from the sequences set forth in GenBank Accession No. NP_{—}064510, AAD33923, AAF67470, AA109195, and BAC11123. In another embodiment, the BLAME protein is referred to as “SLAMF8.” In another embodiment, the BLAME protein is encoded by any other BLAME gene sequence known in the art. In another embodiment, the BLAME protein is any other BLAME protein known in the art. In another embodiment, the TVM is an isoform of a BLAME protein. In another embodiment, the TVM is a homologue of a BLAME protein. In another embodiment, the TVM is a variant of a BLAME protein. In another embodiment, a BCM-like membrane protein precursor or IgSF protein is utilized in methods and compositions of the present invention. In another embodiment, the protein is encoded by any BCM-like membrane protein precursor or IgSF protein gene sequence known in the art. In another embodiment, the protein is any BCM-like membrane protein precursor or IgSF protein known in the art. In another embodiment, the TVM is an isoform of a BCM-like membrane protein precursor or IgSF protein. In another embodiment, the TVM is a homologue of a BCM-like membrane protein precursor or IgSF protein. In another embodiment, an FLJ20442 protein is utilized in methods and compositions of the present invention. In another embodiment, the FLJ20442 protein is encoded by any FLJ20442 gene sequence known in the art. In another embodiment, the FLJ20442 protein is any FLJ20442 protein known in the art. In another embodiment, the TVM is an isoform of an FLJ20442 protein. In another embodiment, the TVM is a homologue of an FLJ20442 protein. In another embodiment, the TVM is a fragment of a BLAME, IgSF, or FLJ20442 protein. In another embodiment, the TVM is a fragment of an isoform, homologue, or variant of a BLAME, IgSF, or FLJ20442 protein. Each possibility represents another embodiment of the present invention.

[0259] In another embodiment, the TVM is a SPON1 protein. In another embodiment, the marker is a nucleic acid molecule encoding a SPON1 protein. In another embodiment, the SPON1 protein is encoded by a nucleic acid molecule having the sequence set forth in SEQ ID No: 60. In another embodiment, the SPON1 protein is encoded by a nucleic acid molecule having a sequence set forth in GenBank Accession No. NM_{—}006108. In another embodiment, the SPON1 protein is encoded by a nucleic acid molecule having a sequence selected from those set forth in GenBank Accession No. NM_{—}006108, AB051390, AK074803, AK074803, NP_{—}006099, and BC041974. In another embodiment, the SPON1 protein is encoded by a FLJ90322 cDNA. In another embodiment, the SPON1 protein has an AA sequence set forth in one of the above GenBank entries. In another embodiment, the SPON1 protein has an AA sequence selected from the sequences set forth in GenBank Accession No. BAA34482, BAB18461, BAC11217, AAH19825, and AAH41974. In another embodiment, the SPON1 protein is encoded by a nucleic acid molecule comprising a sequence set forth in BC019825, BC041974, and AB018305. In another embodiment, the SPON1 protein has an AA sequence comprising an AA sequence set forth in one of the above GenBank entries. In another embodiment, the SPON1 protein is encoded by any other SPON1 gene sequence known in the art. In another embodiment, the SPON1 protein is any other SPON1 protein known in the art. In another embodiment, the TVM is an isoform of a SPON1 protein. In another embodiment, the TVM is a homologue of a SPON1 protein. In another embodiment, the TVM is a variant of a SPON1 protein. In another embodiment, a VSGP/F-spondin protein is utilized in methods and compositions of the present invention. In another embodiment, the protein is encoded by any VSGP/F-spondin gene sequence known in the art. In another embodiment, the protein is any VSGP/F-spondin protein known in the art. In another embodiment, the TVM is an isoform of a VSGP/F-spondin protein. In another embodiment, the TVM is a homologue of a VSGP/F-spondin protein. In another embodiment, a KIAA0762 protein is utilized in methods and compositions of the present invention. In another embodiment, the protein is encoded by any KIAA0762 gene sequence known in the art. In another embodiment, the protein is any KIAA0762 protein known in the art. In another embodiment, the TVM is an isoform of a KIAA0762 protein. In another embodiment, the TVM is a homologue of a KIAA0762 protein. In another embodiment, the TVM is a fragment of a SPON1, VSGP/F-spondin, or KIAA0762 protein. In another embodiment, the TVM is a fragment of an isoform, homologue, or variant of a SPON1, VSGP/F-spondin, or KIAA0762 protein. Each possibility represents another embodiment of the present invention.

[0260] In another embodiment, the TVM is an STC2 protein. In another embodiment, the marker is a nucleic acid molecule encoding an STC2 protein. In another embodiment, the STC2 protein is encoded by a nucleic acid molecule having the sequence set forth in SEQ ID No: 62. In another embodiment, the STC2 protein is encoded by a nucleic acid molecule having a sequence set forth in GenBank Accession No. BC000658. In another embodiment, the STC2 protein is encoded by a nucleic acid molecule having a sequence selected from those set forth in GenBank Accession No. BC006352, BC013958, AF055460, AB012664, AK027390, AK075406, AF098462, AF031036, BT019591, CR541825, NP_{—}003705, and AK095891. In another embodiment, the STC2 protein is encoded by a cDNA selected from FLJ14484 fis, PSEC0097 fis, and FLJ38572 fis. In another embodiment, the STC2 protein has an AA sequence set forth in one of the above GenBank entries. In another embodiment, the STC2 protein has an AA sequence set forth in GenBank Accession No. AAC27036, AAC97948, AAD01922, AAH00658, AAH06352, AAH13958, AAV38398, BAA33489, and CAG46624. In another embodiment, the STC2 protein is encoded by any other STC2 gene sequence known in the art. In another embodiment, the STC2 protein is any other STC2 protein known in the art. In another embodiment, the TVM is an isoform of an STC2 protein. In another embodiment, the TVM is a homologue of an STC2 protein. In another embodiment, a STC2 precursor protein is utilized in methods and compositions of the present invention. In another embodiment, the protein is encoded by any STC2 precursor gene sequence known in the art. In another embodiment, the protein is any STC2 precursor protein known in the art. In another embodiment, the TVM is an isoform of an STC2 precursor protein. In another embodiment, the TVM is a homologue of an STC2 precursor protein. In another embodiment, the TVM is a variant of an STC2 protein. In another embodiment, the TVM is a fragment of a STC2 protein or precursor thereof. In another embodiment, the TVM is a fragment of an isoform, homologue, or variant of a STC2 protein or precursor thereof. Each possibility represents another embodiment of the present invention.

[0261] In another embodiment, the TVM is a TNFAIP6 protein. In another embodiment, the marker is a nucleic acid molecule encoding a TNFAIP6 protein. In another embodiment, the TNFAIP6 protein is encoded by a nucleic acid molecule having the sequence set forth in SEQ ID No: 68. In another embodiment, the TNFAIP6 protein is encoded by a nucleic acid molecule having a sequence set forth in GenBank Accession No. BC030205. In another embodiment, the TNFAIP6 protein is encoded by a nucleic acid molecule having a sequence selected from those set forth in GenBank Accession No. NM_{—}007115, M31165, AJ421518, and AJ419936. In another embodiment, the TNFAIP6 protein has an AA sequence set forth in one of the above GenBank entries. In another embodiment, the TNFAIP6 protein has an AA sequence selected from the sequences set forth in GenBank entries NP_{—}009046, AAB00792, AAH30205, CAD12353, and CAD13434. In another embodiment, the TNFAIP6 protein is encoded by a nucleic acid molecule comprising a sequence set forth in GenBank entry BC039384. In another embodiment, the TNFAIP6 protein has an AA sequence comprising an AA sequence set forth in GenBank entry BC039384. In another embodiment, the TNFAIP6 protein is encoded by any other TNFAIP6 gene sequence known in the art. In another embodiment, the TNFAIP6 protein is any other TNFAIP6 protein known in the art. In another embodiment, the TVM is an isoform of a TNFAIP6 protein. In another embodiment, the TVM is a homologue of a TNFAIP6 protein. In another embodiment, the TVM is a variant of a TNFAIP6 protein. In another embodiment, a TNFAIP6 precursor protein is utilized in methods and compositions of the present invention. In another embodiment, the protein is encoded by any TNFAIP6 precursor gene sequence known in the art. In another embodiment, the protein is any TNFAIP6 precursor protein known in the art. In another embodiment, the TVM is an isoform of a TNFAIP6 precursor protein. In another embodiment, the TVM is a homologue of a TNFAIP6 precursor protein. In another embodiment, a tumor necrosis factor-stimulated gene 6 (TSG-6) protein is utilized in methods and compositions of the present invention. In another embodiment, the protein is encoded by any TSG-6 gene sequence known in the art. In another embodiment, the protein is any TSG-6 protein known in the art. In another embodiment, the TVM is an isoform of a TSG-6 protein. In another embodiment, the TVM is a homologue of a TSG-6 protein. In another embodiment, the TVM is a fragment of a TNFAIP6 or TSG-6 protein. In another embodiment, the TVM is a fragment of an isoform, homologue, or variant of a TNFAIP6 or TSG-6 protein. Each possibility represents another embodiment of the present invention.

[0262] In another embodiment, the TVM is a TNFRSF21 protein. In another embodiment, the marker is a nucleic acid molecule encoding a TNFRSF21 protein. In another embodiment, the TNFRSF21 protein is encoded by a nucleic acid molecule having the sequence set forth in SEQ ID No: 69. In another embodiment, the TNFRSF21 protein is encoded by a nucleic acid molecule having a sequence set forth in GenBank Accession No. BC010241. In another embodiment, the TNFRSF21 protein is encoded by a nucleic acid molecule having a sequence selected from those set forth in GenBank Accession No. BC017730, NM_{—}014452, AY358304, BC005192, BC015466, AB209394, AJ420531, AF068868, AF208860, BC010241, BT007420, NP_{—}055267, or CR457190. In another embodiment, the TNFRSF21 protein has an AA sequence set forth in one of the above GenBank entries. In another embodiment, the TNFRSF21 protein is encoded by any other TNFRSF21 gene sequence known in the art. In another embodiment, the TNFRSF21 protein is any other TNFRSF21 protein known in the art. In another embodiment, the TVM is an isoform of a TNFRSF21 protein. In another embodiment, the TVM is a homologue of a TNFRSF21 protein. In another embodiment, the TVM is a variant of a TNFRSF21 protein. In another embodiment, a TNFR-related death receptor-6 (DR6) protein is utilized in methods and compositions of the present invention. In another embodiment, the protein is encoded by any DR6 gene sequence known in the art. In another embodiment, the protein is any DR6 protein known in the art. In another embodiment, the TVM is an isoform of a DR6 protein. In another embodiment, the TVM is a homologue of a DR6 protein. In another embodiment, a TNFRSF21 precursor protein is utilized in methods and compositions of the present invention. In another embodiment, the protein is encoded by any TNFRSF21 precursor gene sequence known in the art. In another embodiment, the protein is any TNFRSF21 precursor protein known in the art. In another embodiment, the TVM is an isoform of a TNFRSF21 precursor protein. In another embodiment, the TVM is a homologue of a TNFRSF21 precursor protein. In another embodiment, the TVM is a fragment of a TNFRSF21 protein, DR6 protein, or precursor thereof. In another embodiment, the TVM is a fragment of an isoform, homologue, or variant of a TNFRSF21 protein, DR6 protein, or precursor thereof. Each possibility represents another embodiment of the present invention.

[0263] In another embodiment, the TVM is an FZD1 protein. In another embodiment, the marker is a nucleic acid molecule encoding an FZD10 protein. In another embodiment, the FZD10 protein is encoded by a nucleic acid molecule having the sequence set forth in SEQ ID No: 37. In another embodiment, the FZD10 protein is encoded by a nucleic acid molecule having a sequence set forth in GenBank Accession No. AB027464. In another embodiment, the FZD10 protein is encoded by a nucleic acid molecule having a sequence selected from those set forth in GenBank Accession No. BC070037, BC074997, BC074998, NP_{—}009128, and NM_{—}007197. In another embodiment, the FZD10 protein has an AA sequence set forth in one of the above GenBank entries. In another embodiment, the FZD10 protein is encoded by any other FZD10 gene sequence known in the art. In another embodiment, the FZD10 protein is any other FZD10 protein known in the art. In another embodiment, the TVM is an isoform of an FZD10 protein. In another embodiment, the TVM is a homologue of an FZD10 protein. In another embodiment, the TVM is a variant of an FZD10 protein. In another embodiment, the TVM is a fragment of an FZD10 protein. In another embodiment, the TVM is a fragment of an isoform, homologue, or variant of an FZD10 protein. Each possibility represents another embodiment of the present invention.

[0264] In another embodiment, the TVM is an HOXA9 protein. In another embodiment, the marker is a nucleic acid molecule encoding an HOXA9 protein. In another embodiment, the HOXA9 protein is encoded by a nucleic acid molecule having the sequence:

(SEQ ID No: 85)

agtttcataatttccgtgggtcgggccgggcgggccaggcgctgggcacg
gtgatggccaccactggggccctgggcaactactacgtggactcgttcct
gctgggcgccgacgccgcggatgagctgagcgttggccgctatgcgccgg
ggaccctgggccagcctccccggcaggcggcgacgctggccgagcacccc
gacttcagcccgtgcagcttccagtccaaggcgacggtgtttggcgcctc
gtggaacccagtgcacgcggcgggcgccaacgctgtacccgctgcggtgt
accaccaccatcaccaccacccctacgtgcacccccaggcgcccgtggcg
gcggcggcgccggacggcaggtacatgcgctcctggctggagcccacgcc
cggtgcgctctccttcgcgggcttgccctccagccggccttatggcatta
aacctgaaccgctgtcggccagaaggggtgactgtcccacgcttgacact
cacactttgtccctgactgactatgcttgtggttctcctccagttgatag
agaaaaacaacccagcgaaggcgccttctctgaaaacaatgctgagaatg
agagcggcggagacaagccccccatcgatcccaataacccagcagccaac
tggcttcatgcgcgctccactcggaaaaagcggtgcccctatacaaaaca
ccagaccctggaactggagaaagagtttctgttcaacatgtacctcacca
gggaccgcaggtacgaggtggctcgactgctcaacctcaccgagaggcag
gtcaagatctggttccagaaccgcaggatgaaaatgaagaaaatcaacaa
agaccgagcaaaagacgagtgatgccatttgggcttatttagaaaaaagg
gtaagctagagagaaaaagaaagaactgtccgtcccccttccgccttctc
ccttttctcacccccaccctagcctccaccatccccgcacaaagcggctc
taaacctcaggccacatcttttccaaggcaaaccctgttcaggctggctc
gtaggcctgccgctttgatggaggaggtattgtaagctttccattttcta
taagaaaaaggaaaagttgaggggggggcattagtgctgatagctgtgtg
tgttagcttgtatatatatttttaaaaatctacctgttcctgacttaaaa
caaaaggaaagaaactacctttttataatgcacaactgttgatggtaggc
tgtatagtttttagtctgtgtagttaatttaatttgcagtttgtgcggca
gattgctgtgccaagatacttgaacactgtgttttattgtggtaattatg
ttttgtgattcaaacttctgtgtactgggtgatgcacccattgtgattgt
ggaagatagaattcaatttgaactcaggttgtttatgaggggaaaaaaac
agttgcatagagtatagctctgtagtggaatatgtcttctgtataactag
gctgttaacctatgattgtaaagtagctgtaagaatttcccagtgaaata
aaaaaaaattttaagtgttctcggggatgcatagattcatcattttctcc
accttaaaaatgcgggcatttaagtctgtccattatctatatagtcctgt
cttgtctattgtatatataatctatatgattaaagaaaatatgcataatc
agacaagcttgaatattgtttttgcaccagacgaacagtgaggaaattcg
gagctatacatatgtgcagaaggttactacctagggtttatgcttaattt
taatcggaggaaatgaatgctgattgtaacggagttaattttattgataa
taaattatacactatgaaaccgccattgggctactgtagatttgtatcct
tgatgaatctggggtttccatcagactgaacttacactgtatattttgca
atagttacctcaaggcctactgaccaaattgttgtgttgagatgatattt
aactttttgccaaataaaatatattgattcttttctaaaaaaaaaaaaaa
aaaaaa.

[0265] In another embodiment, the HOXA9 protein is encoded by a nucleic acid molecule having a sequence set forth in GenBank Accession No. BC006537. In another embodiment, the HOXA9 protein is encoded by a nucleic acid molecule having a sequence selected from those set forth in GenBank Accession No. BC010023, NM_{—}152739, U41813, NM_{—}002142, U82759, and BT006990. In another embodiment, the HOXA9 protein has an AA sequence set forth in one of the above GenBank entries. In another embodiment, the HOXA9 protein is encoded by any other HOXA9 gene sequence known in the art. In another embodiment, the HOXA9 protein is any other HOXA9 protein known in the art. In another embodiment, the TVM is an isoform of an HOXA9 protein. In another embodiment, the TVM is a homologue of an HOXA9 protein. In another embodiment, the TVM is a variant of an HOXA9 protein. In another embodiment, the TVM is a fragment of an HOXA9 protein. In another embodiment, the TVM is a fragment of an isoform, homologue, or variant of an HOXA9 protein. Each possibility represents another embodiment of the present invention.

[0266] In another embodiment, the TVM is an SLPI protein. In another embodiment, the marker is a nucleic acid molecule encoding an SLPI protein. In another embodiment, the SLPI protein is encoded by a nucleic acid molecule having the sequence:

(SEQ ID No: 86)

agagtcactcctgccttcaccatgaagtccagcggcctcttccccttcct
ggtgctgcttgccctgggaactctggcaccttgggctgtggaaggctctg
gaaagtccttcaaagctggagtctgtcctcctaagaaatctgcccagtgc
cttagatacaagaaacctgagtgccagagtgactggcagtgtccagggaa
gaagagatgttgtcctgacacttgtggcatcaaatgcctggatcctgttg
acaccccaaacccaacaaggaggaagcctgggaagtgcccagtgacttat
ggccaatgtttgatgcttaacccccccaatttctgtgagatggatggcca
gtgcaagcgtgacttgaagtgttgcatgggcatgtgtgggaaatcctgcg
tttcccctgtgaaagcttgattcctgccatatggaggaggctctggagtc
ctgctctgtgtggtccaggtcctttccaccctgagacttggctccaccac
tgatatcctcctttggggaaaggcttggcacacagcaggctttcaagaag
tgccagttgatcaatgaataaataaacgagcctatttctctttgcaaaaa
aaaaaaaaaaaaaaaaaaaaaaaaa.

[0267] In another embodiment, the SLPI protein is encoded by a nucleic acid molecule having a sequence set forth in GenBank Accession No. BC020708. In another embodiment, the SLPI protein is encoded by a nucleic acid molecule having a sequence selected from those set forth in GenBank Accession No. NM_{—}003064, X04470, X04503, and AF114471. In another embodiment, the SLPI protein has an AA sequence set forth in one of the above GenBank entries. In another embodiment, the SLPI protein is encoded by any other SLPI gene sequence known in the art. In another embodiment, the SLPI protein is any other SLPI protein known in the art. In another embodiment, the TVM is an isoform of an SLPI protein. In another embodiment, the TVM is a homologue of an SLPI protein. In another embodiment, the TVM is a variant of an SLPI protein. In another embodiment, the TVM is a fragment of an SLPI protein. In another embodiment, the TVM is a fragment of an isoform, homologue, or variant of an SLPI protein. Each possibility represents another embodiment of the present invention.

[0268] In another embodiment, the TVM is a KIBRA protein. In another embodiment, the marker is a nucleic acid molecule encoding a KIBRA protein. In another embodiment, the KIBRA protein is encoded by a nucleic acid molecule having the sequence:

(SEQ ID No: 87)

caaccttctcagctacaaatacttgaagaaacagagcagggagctcaagc
cagtgggagtcatggcccctgcctcagggcctgccagcacggacgctgtg
tctgctctgttggaacagacagcagtggagctggagaagaggcaggaggg
caggagcagcacacagacactggaagacagctggaggtatgaggagacca
gtgagaatgaggcagtagccgaggaagaggaggaggaggtggaggaggag
gagggagaagaggatgttttcaccgagaaagcctcacctgatatggatgg
gtacccagcattaaaggtggacaaagagaccaacacggagaccccggccc
catcccccacagtggtgcgacctaaggaccggagagtgggcaccccgtcc
caggggccatttcttcgagggagcaccatcatccgctctaagaccttctc
cccaggaccccagagccagtacgtgtgccggctgaatcggagtgatagtg
acagctccactctgtccaaaaagccaccttttgttcgaaactccctggag
cgacgcagcgtccggatgaagcggccttcctcggtcaagtcgctgcgctc
cgagcgtctgatccgtacctcgctggacctggagttagacctgcaggcga
caagaacctggcacagccaattgacccaggagatctcggtgctgaaggag
ctcaaggagcagctggaacaagccaagagccacggggagaaggagctgcc
acagtggttgcgtgaggacgagcgtttccgcctgctgctgaggatgctgg
agaagcggcagatggaccgagcggagcacaagggtgagcttcagacagac
aagatgatgagggcagctgccaaggatgtgcacaggctccgaggccagag
ctgtaaggaacccccagaagttcagtctttcagggaggagatggcatttt
tcacccggcctcggatgaatatcccagctctctctgcagatgacgtctaa
tcgccagaaaagtatttcctttgttccactgacaggctgtgaacattgac
tgtggctaaagttatttatgtggtgttatatgaaggtactgagtcacaag
tcctctagtgctcttgttggtttgaagatgaaccgactttttagtttggt
cctactgttgttattaaaaaaaaaaaaaaaacaaaaaaaaaaaaaaaaaa
aaaaaaaaa.

[0269] In another embodiment, the KIBRA protein is encoded by a nucleic acid molecule having a sequence set forth in GenBank Accession No. BC004394. In another embodiment, the KIBRA protein is encoded by a nucleic acid molecule having a sequence selected from those set forth in GenBank Accession No. AK001727, NM_{—}015238, BC017746, AF506799, AY189820, AF530058, AB020676, and BX640827. In another embodiment, the KIBRA protein has an AA sequence set forth in one of the above GenBank entries. In another embodiment, the KIBRA protein is encoded by any other KIBRA gene sequence known in the art. In another embodiment, the KIBRA protein is any other KIBRA protein known in the art. In another embodiment, the TVM is an isoform of a KIBRA protein. In another embodiment, the TVM is a homologue of a KIBRA protein. In another embodiment, the TVM is a variant of a KIBRA protein. In another embodiment, the TVM is a fragment of a KIBRA protein. In another embodiment, the TVM is a fragment of an isoform, homologue, or variant of a KIBRA protein. Each possibility represents another embodiment of the present invention.

[0270] In another embodiment, the TVM is an IL10RA protein. In another embodiment, the marker is a nucleic acid molecule encoding an IL10RA protein. In another embodiment, the IL10RA protein is encoded by a nucleic acid molecule having the sequence:

(SEQ ID No: 142)

tggaggcgcgcaggccggctccgctccggccccggacgatgcggcgcgcc
caggatgctgccgtgcctcgtagtgctgctggcggcgctcctcagcctcc
gtcttggctcagacgctcatgggacagagctgcccagccctccgtctgtg
tggtttgaagcagaatttttccaccacatcctccactggacacccatccc
aaatcagtctgaaagtacctgctatgaagtggcactcctgaggtatggaa
tagagtcctggaactccatctccaactgtagccagaccctgtcctatgac
cttaccgcagtgaccttggacctgtaccacagcaatggctaccgggccag
agtgcgggctgtggacggcagccggcactccaactggaccgtcaccaaca
cccgcttctctgtggatgaagtgactctgacagttggcagtgtgaaccta
gagatccacaatggcttcatcctcgggaagattcagctacccaggcccaa
gatggcccccgcaaatgacacatatgaaagcatcttcagtcacttccgag
agtatgagattgccattcgcaaggtgccgggaaacttcacgttcacacac
aagaaagtaaaacatgaaaacttcagcctcctaacctctggagaagtggg
agagttctgtgtccaggtgaaaccatctgtcgcttcccgaagtaacaagg
ggatgtggtctaaagaggagtgcatctccctcaccaggcagtatttcacc
gtgaccaacgtcatcatctcaagaagcccagccccttcatcttcatcagc
cagcgtccctccccagagacccaagacaccatccacccgcttgatgagga
ggcctttttgaaggtgtccccagagctgaagaacttggacctgcacggca
gcacagacagtggctttggcagcaccaagccatccctgcagactgaagag
ccccagttcctcctccctgaccctcacccccaggctgacagaacgctggg
aaacggggagccccctgtgctgggggacagctgcagtagtggcagcagca
atagcacagacagcgggatctgcctgcaggagcccagcctgagccccagc
acagggcccacctgggagcaacaggtggggagcaacagcaggggccagga
tgacagtggcattgacttagttcaaaactctgagggccgggctggggaca
cacagggtggctcggccttgggccaccacagtcccccggagcctgaggtg
cctggggaagaagacccagctgctgtggcattccagggttacctgaggca
gaccagatgtgctgaagagaaggcaaccaagacaggctgcctggaggaag
aatcgcccttgacagatggccttggccccaaattcgggagatgcctggtt
gatgaggcaggcttgcatccaccagccctggccaagggctatttgaaaca
ggatcctctagaaatgactctggcttcctcaggggccccaacgggacagt
ggaaccagcccactgaggaatggtcactcctggccttgagcagctgcagt
gacctgggaatatctgactggagctttgcccatgaccttgcccctctagg
ctgtgtggcagccccaggtggtctcctgggcagctttaactcagacctgg
tcaccctgcccctcatctctagcctgcagtcaagtgagtgactcgggctg
agaggctgcttttgattttagccatgcctgctcctctgcctggaccagga
ggagggcccctggggcagaagttaggcacgaggcagtctgggcacttttc
tgcaagtccactggggctggccccagccaggccctgcagggctggtcagg
gtgtctggggcaggaggaggccaactcactgaactagtgcagggtatgtg
ggtggcactgacctgttctgttgactggggccctgcagactctggcagag
ctgagaagggcagggaccttctccctcctaggaactctttcctgtatcat
aaggattatttgctcaggggaaccatggggctttctggagttgtggtgag
gccaccaggctgaagtcagctcagacccagacctccctgcttaggccact
cgagcatcagagcttccagcaggaggaagggctgtaggaatggaagcttc
agggccttgctgctggggtcatttttaggggaaaaaggaggatatgatgg
tcacatggggaacctcccctcatcgggcctctggggcaggaagcttgtca
ctggaagatcttaaggtatatattttctggacactcaaacacatcataat
ggattcactgaggggagacaaagggagccgagaccctggatggggcttcc
agctcagaacccatccctctggtgggtacctctggcacccatctgcaaat
atctccctctctccaacaaatggagtagcatccccctggggcacttgctg
aggccaagccactcacatcctcactttgctgccccaccatcttgctgaca
acttccagagaagccatggttttttgtattggtcataactcagccctttg
ggcggcctctgggcttgggcaccagctcatgccagccccagagggtcagg
gttggaggcctgtgcttgtgtttgctgctaatgtccagctacagacccag
aggataagccactgggcactgggctggggtccctgccttgttggtgttca
gctgtgtgattttggactagccacttgtcagagggcctcaatctcccatc
tgtgaaataaggactccacctttaggggaccctccatgtttgctgggtat
tagccaagctggtcctgggagaatgcagatactgtccgtggactaccaag
ctggcttgtttcttatgccagaggctaacagatccaatgggagtccatgg
tgtcatgccaagacagtatcagacacagccccagaagggggcattatggg
ccctgcctccccataggccatttggactctgccttcaaacaaaggcagtt
cagtccacaggcatggaagctgtgaggggacaggcctgtgcgtgccatcc
agagtcatctcagccctgcctttctctggagcattctgaaaacagatatt
ctggcccagggaatccagccatgacccccacccctctgccaaagtactct
taggtgccagtctggtaactgaactccctctggaggcaggcttgagggag
gattcctcagggttcccttgaaagctttatttatttattttgttcattta
tttattggagaggcagcattgcacagtgaaagaattctggatatctcagg
agccccgaaattctagctctgactttgctgtttccagtggtatgaccttg
gagaagtcacttatcctcttggagcctcagtttcctcatctgcagaataa
tgactgacttgtctaattcgtagggatgtgaggttctgctgaggaaatgg
gtatgaatgtgccttgaacacaaagctctgtcaataagtgatacatgttt
tttattccaataaattgtcaagaccacaaaaaaaaaaaaaaaaaaaaaaa
aaaaaaaaaaaaaaaaaaaaaaaaaaaaaaaaaaaaaaaa.

[0271] In another embodiment, the IL10RA protein is encoded by a nucleic acid molecule having a sequence set forth in GenBank Accession No. BC028082. In another embodiment, the IL10RA protein is encoded by a nucleic acid molecule having a sequence selected from those set forth in GenBank Accession No. NM_{—}001558, AB209626, U00672, and BC028082. In another embodiment, the IL10RA protein has an AA sequence set forth in one of the above GenBank entries. In another embodiment, the IL10RA protein is encoded by any other IL10RA gene sequence known in the art. In another embodiment, the IL10RA protein is any other IL10RA protein known in the art. In another embodiment, the TVM is an isoform of an IL10RA protein. In another embodiment, the TVM is a homologue of an IL10RA protein. In another embodiment, the TVM is a variant of an IL10RA protein. In another embodiment, the TVM is a fragment of an IL10RA protein. In another embodiment, the TVM is a fragment of an isoform, homologue, or variant of an IL10RA protein. Each possibility represents another embodiment of the present invention.

[0272] In another embodiment, the TVM is an ADAM12 protein. In another embodiment, the marker is a nucleic acid molecule encoding an ADAM12 protein. In another embodiment, the ADAM12 nucleotide is a long isoform of ADAM12. In another embodiment, the ADAM12 nucleotide is a short isoform of ADAM12. In another embodiment, the ADAM12 protein is encoded by a nucleic acid molecule having the sequence:

(SEQ ID No: 1)

cactaacgctcttcctagtccccgggccaactcggacagtttgctcattt
attgcaacggtcaaggctggcttgtgccagaacggcgcgcgcgcgacgca
cgcacacacacggggggaaacttttttaaaaatgaaaggctagaagagct
cagcggcggcgcgggccgtgcgcgagggctccggagctgactcgccgagg
caggaaatccctccggtcgcgacgcccggccccgctcggcgcccgcgtgg
gatggtgcagcgctcgccgccgggcccgagagctgctgcactgaaggccg
gcgacgatggcagcgcgcccgctgcccgtgtcccccgcccgcgccctcct
gctcgccctggccggtgctctgctcgcgccctgcgaggcccgaggggtga
gcttatggaaccaaggaagagctgatgaagttgtcagtgcctctgttcgg
agtggggacctctggatcccagtgaagagcttcgactccaagaatcatcc
agaagtgctgaatattcgactacaacgggaaagcaaagaactgatcataa
atctggaaagaaatgaaggtctcattgccagcagtttcacggaaacccac
tatctgcaagacggtactgatgtctccctcgctcgaaattacacggtaat
tctgggtcactgttactaccatggacatgtacggggatattctgattcag
cagtcagtctcagcacgtgttctggtctcaggggacttattgtgtttgaa
aatgaaagctatgtcttagaaccaatgaaaagtgcaaccaacagatacaa
actcttcccagcgaagaagctgaaaagcgtccggggatcatgtggatcac
atcacaacacaccaaacctcgctgcaaagaatgtgtttccaccaccctct
cagacatgggcaagaaggcataaaagagagaccctcaaggcaactaagta
tgtggagctggtgatcgtggcagacaaccgagagtttcagaggcaaggaa
aagatctggaaaaagttaagcagcgattaatagagattgctaatcacgtt
gacaagttttacagaccactgaacattcggatcgtgttggtaggcgtgga
agtgtggaatgacatggacaaatgctctgtaagtcaggacccattcacca
gcctccatgaatttctggactggaggaagatgaagcttctacctcgcaaa
tcccatgacaatgcgcagcttgtcagtggggtttatttccaagggaccac
catcggcatggccccaatcatgagcatgtgcacggcagaccagtctgggg
gaattgtcatggaccattcagacaatccccttggtgcagccgtgaccctg
gcacatgagctgggccacaatttcgggatgaatcatgacacactggacag
gggctgtagctgtcaaatggcggttgagaaaggaggctgcatcatgaacg
cttccaccgggtacccatttcccatggtgttcagcagttgcagcaggaag
gacttggagaccagcctggagaaaggaatgggggtgtgcctgtttaacct
gccggaagtcagggagtctttcgggggccagaagtgtgggaacagatttg
tggaagaaggagaggagtgtgactgtggggagccagaggaatgtatgaat
cgctgctgcaatgccaccacctgtaccctgaagccggacgctgtgtgcgc
acatgggctgtgctgtgaagactgccagctgaagcctgcaggaacagcgt
gcagggactccagcaactcctgtgacctcccagagttctgcacaggggcc
agccctcactgcccagccaacgtgtacctgcacgatgggcactcatgtca
ggatgtggacggctactgctacaatggcatctgccagactcacgagcagc
agtgtgtcacactctggggaccaggtgctaaacctgcccctgggatctgc
tttgagagagtcaattctgcaggtgatccttatggcaactgtggcaaagt
ctcgaagagttcctttgccaaatgcgagatgagagatgctaaatgtggaa
aaatccagtgtcaaggaggtgccagccggccagtcattggtaccaatgcc
gtttccatagaaacaaacatccccctgcagcaaggaggccggattctgtg
ccgggggacccacgtgtacttgggcgatgacatgccggacccagggcttg
tgcttgcaggcacaaagtgtgcagatggaaaaatctgcctgaatcgtcaa
tgtcaaaatattagtgtctttggggttcacgagtgtgcaatgcagtgcca
cggcagaggggtgtgcaacaacaggaagaactgccactgcgaggcccact
gggcacctcccttctgtgacaagtttggctttggaggaagcacagacagc
ggccccatccggcaagcagataaccaaggtttaaccataggaattctggt
gaccatcctgtgcttcttgctgccggatttgtggtttatctcaaaaggaa
gaccttgatacgactgctgtttacaaataagaagaccaccattgaaaaac
taaggtgtgtgcgcccttcccggccaccccgtggcttccaaccctgtcag
gctcacctcggccaccttggaaaaggcctgatgaggaagccgccagattc
ctacccaccgaaggacaatcccaggagattgctgcagtgtcagaatgttg
acatcagcagacccctcaacggcctgaatgtccctcagccccagtcaact
cagcgagtgcttcctcccctccaccgggccccacgtgcacctagcgtccc
tgccagacccctgccagccaagcctgcacttaggcaggcccaggggacct
gtaagccaaacccccctcagaagcctctgcctgcagatcctctggccaga
acaactcggctcactcatgccttggccaggaccccaggacaatgggagac
tgggctccgcctggcacccctcagacctgctccacaatatccacaccaag
tgcccagatccacccacaccgcctatattaagtgagaagccgacaccttt
tttcaacagtgaagacagaagtttgcactatctttcagctccagttggag
ttttttgtaccaacttttaggattttttttaatgtttaaaacatcattac
tataagaactttgagctactgccgtcagtgctgtgctgtgctatggtgct
ctgtctacttgcacaggtacttgtaaattattaatttatgcagaatgttg
attacagtgcagtgcgctgtagtaggcatttttaccatcactgagttttc
catggcaggaaggcttgttgtgcttttagtattttagtgaacttgaaata
tcctgcttgatgggattctggacaggatgtgtttgctttctgatcaaggc
cttattggaaagcagtcccccaactacccccagctgtgcttatggtacca
gatgcagctcaagagatcccaagtagaatctcagttgattttctggattc
cccatctcaggccagagccaaggggcttcaggtccaggctgtgtttggct
ttcagggaggccctgtgccccttgacaactggcaggcaggctcccaggga
cacctgggagaaatctggcttctggccaggaagctttggtgagaacctgg
gttgcagacaggaatcttaaggtgtagccacaccaggatagagactggaa
cactagacaagccagaacttgaccctgagctgaccagccgtgagcatgtt
tggaaggggtctgtagtgtcactcaaggcggtgcttgatagaaatgccaa
gcacttctttttctcgctgtcctttctagagcactgccaccagtaggtta
tttagcttgggaaaggtggtgtttctgtaagaaacctactgcccaggcac
tgcaaaccgccacctccctatactgcttggagctgagcaaatcaccacaa
actgtaatacaatgatcctgtattcagacagatgaggactttccatggga
ccacaactattttcagatgtgaaccattaaccagatctagtcaatcaagt
ctgtttactgcaaggttcaacttattaacaattaggcagactctttatgc
ttgcaaaaactacaaccaatggaatgtgatgttcatgggtatagttcatg
tcgctatcattattcgtagatattggacaaagaaccttctctatggggca
tcctctttttccaacttggctgcaggaatctttaaaagatgcttttaaca
gagtctgaacctatttcttaaacacttgcaacctacctgttgagcatcac
agaatgtgataaggaaatcaacttgcttatcaacttcctaaatattatga
gatgtggcttgggcagcatccccttgaactcttcactcttcaaatgcctg
actagggagccatgtttcacaaggtctttaaagtgactaatggcatgaga
aatacaaaaatactcagataaggtaaaatgccatgatgcctctgtcttct
ggactggttttcacattagaagacaattgacaacagttacataattcact
ctgagtgttttatgagaaagccttcttttggggtcaacagttttcctatg
ctttgaaacagaaaaatatgtaccaagaatcttggtttgccttccagaaa
acaaaactgcatttcactttcccggtgttccccactgtatctaggcaaca
tagtattcatgactatggataaactaaacacgtgacacaaacacacacaa
aagggaacccagctctaatacattccaactcgtatagcatgcatctgttt
attctatagttattaagttctttaaaatgtaaagccatgctggaaaataa
tactgctgagatacatacagaattactgtaactgattacacttggtaatt
gtactaaagccaaacatatatatactattaaaaaggtttacagaatttta
tggtgcattacgttgggcattgtctttttagatgcccaaatccttagatc
tggcatgttagcccttcctccaattataagaggatatgaaccaaaaaaaa
aaaaaaaaaaa.

[0273] In another embodiment, the ADAM12 protein is a long isoform of ADAM12. In another embodiment, the ADAM12 protein is a short isoform of ADAM12. In another embodiment, the ADAM12 protein is encoded by a nucleic acid molecule having a sequence set forth in GenBank Accession No. AF023476. In another embodiment, the ADAM12 protein is encoded by a nucleic acid molecule having a sequence set forth in GenBank Accession No. AF023477. In another embodiment, the ADAM12 protein is encoded by a nucleic acid molecule having a sequence set forth in GenBank Accession No. NM_{—}003474. In another embodiment, the ADAM12 protein has an AA sequence set forth in 1 of the above GenBank entries. In another embodiment, the ADAM12 protein is encoded by any other ADAM12 gene sequence known in the art. In another embodiment, the ADAM12 protein is any other ADAM12 protein known in the art. In another embodiment, the TVM is an isoform of an ADAM12 protein. In another embodiment, the TVM is a homologue of an ADAM12 protein. In another embodiment, the TVM is a variant of an ADAM12 protein. In another embodiment, the TVM is a fragment of an ADAM12 protein. In another embodiment, the TVM is a fragment of an isoform, homologue, or variant of an ADAM12 protein. Each possibility represents another embodiment of the present invention.

[0274] In another embodiment, the TVM is a PCDH17 protein. In another embodiment, the marker is a nucleic acid molecule encoding a PCDH17 protein. In another embodiment, the PCDH17 protein is encoded by a nucleic acid molecule having the sequence set forth in SEQ ID No: 49. In another embodiment, the PCDH17 protein is encoded by a nucleic acid molecule having a sequence set forth in GenBank Accession No. AL137505. In another embodiment, the PCDH17 protein has an AA sequence set forth in GenBank Accession No. AL137505. In another embodiment, the PCDH17 protein is encoded by any other PCDH17 gene sequence known in the art. In another embodiment, the PCDH17 protein is any other PCDH17 protein known in the art. In another embodiment, the TVM is an isoform of a PCDH17 protein. In another embodiment, the TVM is a homologue of a PCDH17 protein. In another embodiment, the TVM is a variant of a PCDH17 protein. In another embodiment, the TVM is a fragment of a PCDH17 protein. In another embodiment, the TVM is a fragment of an isoform, homologue, or variant of a PCDH17 protein. Each possibility represents another embodiment of the present invention.

[0275] In another embodiment, the TVM is an AML-1 protein. In another embodiment, the marker is a nucleic acid molecule encoding an AML-1 protein. In another embodiment, the AML-1 protein is encoded by a nucleic acid molecule having the sequence:

(SEQ ID No: 5)

catagagccagcgggcgcgggcgggacgggcgccccgcggccggacccag
ccagggcaccacgctgcccggccctgcgccgccaggcacttctttccggg
gctcctagggacgccagaaggaagtcaacctctgctgcttctccttggcc
tgcgttggaccttcctttttttgttgtttttttttgtttttcccctttct
tccttttgaattaactggcttcttggctggatgttttcaacttctttcct
ggctgcgaacttttccccaattgttttccttttacaacagggggagaaag
tgctctgtggtccgaggcgagccgtgaagttgcgtgtgcgtggcagtgtg
cgtggcaggatgtgcgtgcgtgtgtaacccgagccgcccgatctgtttcg
atctgcgccgcggagccctccctcaaggcccgctccacctgctgcggtta
cgcggcgctcgtgggtgttcgtgcctcggagcagctaaccggcgggtgct
gggcgacggtggaggagtatcgtctcgctgctgcccgagtcagggctgag
tcacccagctgatgtagacagtggctgccttccgaagagtgcgtgtttgc
atgtgtgtgactctgcggctgctcaactcccaacaaaccagaggaccagc
cacaaacttaaccaacatccccaaacccgagttcacagatgtgggagagc
tgtagaaccctgagtgtcatcgactgggccttcttatgattgttgtttta
agattagctgaagatctctgaaacgctgaattttctgcactgagcgtttt
gacagaattcattgagagaacagagaacatgacaagtacttctagctcag
cactgctccaactactgaagctgattttcaaggctacttaaaaaaatctg
cagcgtacattaatggatttctgttgtgtttaaattctccacagattgta
ttgtaaatattttatgaagtagagcatatgtatatatttatatatacgtg
cacatacattagtagcactacctttggaagtctcagctcttgcttttcgg
gactgaagccagttttgcatgataaaagtggccttgttacgggagataat
tgtgttctgttgggactttagacaaaactcacctgcaaaaaactgacagg
cattaactactggaacttccaaataatgtgtttgctgatcgttttactct
tcgcataaatattttaggaagtgtatgagaattttgccttcaggaacttt
tctaacagccaaagacagaacttaacctctgcaagcaagattcgtggaag
atagtctccactttttaatgcactaagcaatcggtitgctaggagcccat
cctgggtcagaggccgatccgcagaaccagaacgttttcccctcctggac
tgttagtaacttagtctccctcctcccctaaccacccccgccccccccca
ccccccgcagtaataaaggcccctgaacgtgtatgttggtctcccgggag
ctgcttgctgaagatccgcgcccctgtcgccgtctggtaggagctgtttg
cagggtcctaactcaatcggcttgttgtgatgcgtatccccgtagatgcc
agcacgagccgccgcttcacgccgccttccaccgcgctgagcccaggcaa
gatgagcgaggcgttgccgctgggcgccccggacgccggcgctgccctgg
ccggcaagctgaggagcggcgaccgcagcatggtggaggtgctggccgac
cacccgggcgagctggtgcgcaccgacagccccaacttcctctgctccgt
gctgcctacgcactggcgctgcaacaagaccctgcccatcgctttcaagg
tggtggccctaggggatgttccagatggcactctggtcactgtgatggct
ggcaatgatgaaaactactcggctgagctgagaaatgctaccgcagccat
gaagaaccaggttgcaagatttaatgacctcaggtttgtcggtcgaagtg
gaagagggaaaagcttcactctgaccatcactgtcttcacaaacccaccg
caagtcgccacctaccacagagccatcaaaatcacagtggatgggccccg
agaacctcgaagacatcggcagaaactagatgatcagaccaagcccggga
gcttgtccttttccgagcggctcagtgaactggagcagctgcggcgcaca
gccatgagggtcagcccacaccacccagcccccacgcccaaccctcgtgc
ctccctgaaccactccactgcctttaaccctcagcctcagagtcagatgc
aggatacaaggcagatccaaccatccccaccgtggtcctacgatcagtcc
taccaatacctgggatccattgcctctccttctgtgcacccagcaacgcc
catttcacctggacgtgccagcggcatgacaaccctctctgcagaacttt
ccagtcgactctcaacggcacccgacctgacagcgttcagcgacccgcgc
cagttccccgcgctgccctccatctccgacccccgcatgcactatccagg
cgccttcacctactccccgacgccggtcacctcgggcatcggcatcggca
tgtcggccatgggctcggccacgcgctaccacacctacctgccgccgccc
taccccggctcgtcgcaagcgcagggaggcccgttccaagccagctcgcc
ctcctaccacctgtactacggcgcctcggccggctcctaccagttctcca
tggtgggcggcgagcgctcgccgccgcgcatcctgccgccctgcaccaac
gcctccaccggctccgcgctgctcaaccccagccrcccgaaccagagcga
cgtggtggaggccgagggcagccacagcaactcccccaccaacatggcgc
cctccgcgcgcctggaggaggccgtgtggaggccctactgaggcgccagg
cctggcccggctgggccccgcgggccgccgccttcgcctccgggcgcgcg
ggcctcctgttcgcgacaagcccgccgggatcccgggccctgggcccggc
caccgtcctggggccgagggcgcccgacggccaggatctcgctgtaggtc
aggcccgcgcagcctcctgcgcccagaagcccacgccgccgccgtctgct
ggcgccccggccctcgcggaggtgtccgaggcgacgcacctcgagggtgt
ccgccggccccagcacccaggggacgcgctggaaagcaaacaggaagatt
cccggagggaaactgtgaatgcttctgatttagcaatgctgtgaataaaa
agaaagattttatacccttgacttaactttttaaccaagttgtttattcc
aaagagtgtggaattttggttggggtggggggagaggagggatgcaactc
gccctgtttggcatctaattcttatttttaatttttccgcaccttatcaa
ttgcaaaatgcgtatttgcatttgggtggtttttatttttatatacgttt
atataaatatatataaattgagcttgcttctttcttgctttgaccatgga
aagaaatatgattcccttttctttaagttttatttaacttttcttttgga
cttttgggtagttgtttttttttgttttgttttgtttttttgagaaacag
ctacagctttgggtcatttttaactactgtattccacaaggaatccccag
atatttatgtatcttgatgttcagacatttatgtgttgataattttttaa
ttatttaaatgtacttatattaagaaaaatatcaagtactacattttctt
ttgttcttgatagtagccaaagttaaatgtatcacattgaagaaggctag
aaaaaaagaatgagtaatgtgatcgcttggttatccagaagtattgttta
cattaaactccctttcatgttaatcaaacaagtgagtagctcacgcagca
acgtttttaataggatttttagacactgagggtcactccaaggatcagaa
gtatggaattttctgccaggctcaacaagggtctcatatctaacttcctc
cttaaaacagagaaggtcaatctagttccagagggttgaggcaggtgcca
ataattacatctttggagaggatttgatttctgcccagggatttgctcac
cccaaggtcatctgataatttcacagatgctgtgtaacagaacacagcca
aagtaaactgtgtaggggagccacatttacataggaaccaaatcaatgaa
tttaggggttacgattatagcaatttaagggccaccagaagcaggcctcg
aggagtcaatttgcctctgtgtgcctcagtggagacaagtgggaaaacat
ggtcccacctgtgcgagaccccctgtcctgtgctgctcactcaacaacat
ctttgtgttgctttcaccaggctgagaccctaccctatggggtatatggg
cttttacctgtgcaccagtgtgacaggaaagattcatgtcactactgtcc
gtggctacaattcaaaggtatccaatgtcgctgtaaattttatggcacta
tttttattggaggatttggtcagaatgcagttgttgtacaactcataaat
actaactgctgattttgacacatgtgtgctccaaatgatctggtggttat
ttaacgtacctcttaaaattcgttgaaacgatttcaggtcaactctgaag
agtatttgaaagcaggacttcagaacagtgtttgatttttattttataaa
tttaagcattcaaattaggcaaatctttggctgcaggcagcaaaaacagc
tggacttatttaaaacaacttgtttttgagttttcttatatatatattga
ttatttgttttacacacatgcagtagcactttggtaagagttaaagagta
aagcagcttatgttgtcaggtcgttcttatctagagaagagctatagcag
atctcggacaaactcagaatatattcactttcatttttgacaggattccc
tccacaactcagtttcatatattattccgtattacatttttgcagctaaa
ttaccataaaatgtcagcaaatgtaaaaatttaatttctgaaaagcacca
ttagcccatttcccccaaattaaacgtaaatgttttttttcagcacatgt
taccatgtctgacctgcaaaaatgctggagaaaaatgaaggaaaaattat
gtttttcagtttaattctgttaactgaagatattccaactcaaaaccagc
ctcatgctctgattagataatcttttacattgaacctttactctcaaagc
catgtgtggagggggcttgtcactattgtaggctcactggattggtcatt
tagagtttcacagactcttaccagcatatatagtatttaattgtttcaaa
aaaaatcaaactgtagttgttttggcgataggtctcacgcaacacatttt
tgtatgtgtgtgtgtgtgcgtgtgtgtgtgtgtgtgtaaaaattgcattc
attgacttcaggtagattaaggtatctttttattcattgccctcaggaaa
gttaaggtatcaatgagacccttaagccaatcatgtaataactgcatgtg
tctggtccaggagaagtattgaataagccatttctactgcttactcatgt
ccctatttatgatttcaacatggatacatatttcagttcttctttttctc
actatctgaaaatacatttccctccctctcttccccccaatatctccctt
tttttctctcttcctctatcttccaaaccccactttctccctcctccttt
tcctgtgttctcttaagcagatagcacatacccccacccagtaccaaatt
tcagaacacaagaaggtccagttcttcccccttcacataaaggaacatgg
tttgtcagcctttctcctgtttatgggtttcttccagcagaacagagaca
ttgccaaccatattggatctgcttgctgtccaaaccagcaaactttcctg
ggcaaatcacaatcagtgagtaaatagacagcctttctgctgccttgggt
ttctgtgcagataaacagaaatgctctgattagaaaggaaatgaatggtc
cactcaaatgtcctgcaatttaggattgcagatttctgccttgaaatacc
tgtttctttgggacattccgtcctgatgatttttatttttgttggttttt
atttttggggggaatgacatgtttgggtcttttatacatgaaaatttgtt
tgacaataatctcacaaaacatattttacatctgaacaaaatgccttttt
gtttaccgtagcgtatacatttgttttgggatttttgtgtgtttgttggg
aattttgtttttagccaggtcagtattgatgaggctgatcatttggctct
ttttttccttccagaagagttgcatcaacaaagttaattgtatttatgta
tgtaaatagattttaagcttcattataaaatattgttaatgcctataact
ttttttcaatttttttgtgtgtgtttctaaggactttttcttaggtttgc
taaatactgtagggaaaaaaatgcttctttctactttgtttattttagac
tttaaaatgagctacttcttattcacttttgtaaacagctaatagcatgg
ttccaattttttttaagttcactttttttgttctaggggaaatgaatgtg
caaaaaaagaaaaagaactgttggttatttgtgttattctggatgtataa
aaatcaatggaaaaaaataaactttcaaattgaaatgacggtataacaca
tctactgaaaaagcaacgggaaatgtggtcctatttaagccagcccccac
ctagggtctatttgtgtggcagttattgggtttggtcacaaaacatcctg
aaaattcgtgcgtgggcttctttctccctggtacaaacgtatggaatgct
tcttaaaggggaactgtcaagctggtgtcttcagccagatgacatgagag
aatatcccagaaccctctctccaaggtgtttctagatagcacaggagagc
aggcactgcactgtccacagtccacggtacacagtcgggtgggccgcctc
ccctctcctgggagcattcgtcgtgcccagcctgagcagggcagctggac
tgctgctgttcaggagccaccagagccttcctctctttgtaccacagttt
cttctgtaaatccagtgttacaatcagtgtgaatggcaaataaacagttt
gacaagtacatacaccataaaaaaaaaaaaaaaa.

[0276] In another embodiment, the AML-1 protein is encoded by a nucleic acid molecule having a sequence set forth in GenBank Accession No. NM_{—}001001890. In another embodiment, the AML-1 protein is encoded by a nucleic acid molecule having a sequence set forth in GenBank Accession No. NM_{—}001754. In another embodiment, the AML-1 protein has an AA sequence set forth in 1 of the above GenBank entries. In another embodiment, the AML-1 protein is encoded by any other AML-1 gene sequence known in the art. In another embodiment, the AML-1 protein is any other AML-1 protein known in the art. In another embodiment, the TVM is an isoform of an AML-1 protein. In another embodiment, the TVM is a homologue of an AML-1 protein. In another embodiment, the TVM is a variant of an AML-1 protein. In another embodiment, the TVM is a fragment of an AML-1 protein. In another embodiment, the TVM is a fragment of an isoform, homologue, or variant of an AML-1 protein. Each possibility represents another embodiment of the present invention.

[0277] In another embodiment, the TVM is a SLIT2 protein. In another embodiment, the marker is a nucleic acid molecule encoding a SLIT2 protein. In another embodiment, the SLIT2 protein is encoded by a nucleic acid molecule having the sequence:

(SEQ ID No: 59)

cagagcagggtggagagggcggtgggaggcgtgtgcctgagtgggctcta
ctgccttgttccatattattttgtgcacattttccctggcactctgggtt
gctagccccgccgggcactgggcctcagacactgcgcggttccctcggag
cagcaagctaaagaaagcccccagtgccggcgaggaaggaggcggcgggg
aaagatgcgcggcgttggctggcagatgctgtccctgtcgctggggttag
tgctggcgatcctgaacaaggtggcaccgcaggcgtgcccggcgcagtgc
tcttgctcgggcagcacagtggactgtcacgggctggcgctgcgcagcgt
gcccaggaatatcccccgcaacaccgagagactggatttaaatggaaata
acatcacaagaattacgaagacagattttgctggtcttagacatctaaga
gttcttcagcttatggagaataagattagcaccattgaaagaggagcatt
ccaggatcttaaagaactagagagactgcgtttaaacagaaatcaccttc
agctgtttcctgagttgctgtttcttgggactgcgaagctatacaggctt
gatctcagtgaaaaccaaattcaggcaatcccaaggaaagctttccgtgg
ggcagttgacataaaaaatttgcaactggattacaaccagatcagctgta
ttgaagatggggcattcagggctctccgggacctggaagtgctcactctc
aacaataacaacattactagactttctgtggcaagtttcaaccatatgcc
taaacttaggacttttcgactgcattcaaacaacctgtattgtgactgcc
acctggcctggctctccgactggcttcgccaaaggcctcgggttggtctg
tacactcagtgtatgggcccctcccacctgagaggccataatgtagccga
ggttcaaaaacgagaatttgtctgcagtggtcaccagtcatttatggctc
cttcttgtagtgttttgcactgccctgccgcctgtacctgtagcaacaat
atcgtagactgtcgtgggaaaggtctcactgagatccccacaaatcttcc
agagaccatcacagaaatacgtttggaacagaacacaatcaaagtcatcc
ctcctggagctttctcaccatataaaaagcttagacgaattgacctgagc
aataatcagatctctgaacttgcaccagatgctttccaaggactacgctc
tctgaattcacttgtcctctatggaaataaaatcacagaactccccaaaa
gtttatttgaaggactgttttccttacagctcctattattgaatgccaac
aagataaactgccttcgggtagatgcttttcaggatctccacaacttgaa
ccttctctccctatatgacaacaagcttcagaccatcgccaaggggacct
tttcacctcttcgggccattcaaactatgcatttggcccagaaccccttt
atttgtgactgccatctcaagtggctagcggattatctccataccaaccc
gattgagaccagtggtgcccgttgcaccagcccccgccgcctggcaaaca
aaagaattggacagatcaaaagcaagaaattccgttgttcagctaaagaa
cagtatttcattccaggtacagaagattatcgatcaaaattaagtggaga
ctgctttgcggatctggcttgccctgaaaagtgtcgctgtgaaggaacca
cagtagattgctctaatcaaaagctcaacaaaatcccggagcacattccc
cagtacactgcagagttgcgtctcaataataatgaatttaccgtgttgga
agccacaggaatctttaagaaacttcctcaattacgtaaaataaacttta
gcaacaataagatcacagatattgaggagggagcatttgaaggagcatct
ggtgtaaatgaaatacttcttacgagtaatcgtttggaaaatgtgcagca
taagatgttcaagggattggaaagcctcaaaactttgatgttgagaagca
atcgaataacctgtgtggggaatgacagtttcataggactcagttctgtg
cgtttgctttctttgtatgataatcaaattactacagttgcaccaggggc
atttgatactctccattctttatctactctaaacctcttggccaatcctt
ttaactgtaactgctacctggcttggttgggagagtggctgagaaagaag
agaattgtcacgggaaatcctagatgtcaaaaaccatacttcctgaaaga
aatacccatccaggatgtggccattcaggacttcacttgtgatgacggaa
atgatgacaatagttgctccccactttctcgctgtcctactgaatgtact
tgcttggatacagtcgtccgatgtagcaacaagggtttgaaggtcttgcc
gaaaggtattccaagagatgtcacagagttgtatctggatggaaaccaat
ttacactggttcccaaggaactctccaactacaaacatttaacacttata
gacttaagtaacaacagaataagcacgctttctaatcagagcttcagcaa
catgacccagctcctcaccttaattcttagttacaaccgtctgagatgta
ttcctcctcgcacctttgatggattaaagtctcttcgattactttctcta
catggaaatgacatttctgttgtgcctgaaggtgctttcaatgatctttc
tgcattatcacatctagcaattggagccaaccctctttactgtgattgta
acatgcagtggttatccgactgggtgaagtcggaatataaggagcctgga
attgctcgttgtgctggtcctggagaaatggcagataaacttttactcac
aactccctccaaaaaatttacctgtcaaggtcctgtggatgtcaatattc
tagctaagtgtaacccctgcctatcaaatccgtgtaaaaatgatggcaca
tgtaatagtgatccagttgacttttaccgatgcacctgtccatatggttt
caaggggcaggactgtgatgtcccaattcatgcctgcatcagtaacccat
gtaaacatggaggaacttgccacttaaaggaaggagaagaagatggattc
tggtgtatttgtgctgatggatttgaaggagaaaattgtgaagtcaacgt
tgatgattgtgaagataatgactgtgaaaataatctacatgtgtcgatgg
cattaataactacacatgcctttgcccacctgagtatacaggtgagttgt
gtgaggagaagctggacttctgtgcccaggacctgaacccctgccagcac
gattcaaagtgcatcctaactccaaagggattcaaatgtgactgcacacc
agggtacgtaggtgaacactgcgacatcgattttgacgactgccaagaca
acaagtgtaaaaacggagcccactgcacagatgcagtgaacggctatacg
tgcatatgccccgaaggttacagtggcttgttctgtgagttttctccacc
catggtcctccctcgtaccagcccctgtgataattttgattgtcagaatg
gagctcagtgtatcgtcagaataaatgagccaatatgtcagtgtttgcct
ggctatcagggagaaaagtgtgaaaaattggttagtgtgaattttataaa
caaagagtcttatcttcagattccttcagccaaggttcggcctcagacga
acataacacttcagattgccacagatgaagacagcggaatcctcctgtat
aagggtgacaaagaccatatcgcggtagaactctatcgggggcgtgttcg
tgccagctatgacaccggctctcatccagcttctgccatttacagtgtgg
agacaatcaatgatggaaacttccacattgtggaactacttgccttggat
cagagtctctctttgtccgtggatggtgggaaccccaaaatcatcactaa
cttgtcaaagcagtccactctgaattttgactctccactctatgtaggag
gcatgccagggaagagtaacgtggcatctctgcgccaggcccctgggcag
aacggaaccagcttccacggctgcatccggaacctttacatcaacagtga
gctgcaggacttccagaaggtgccgatgcaaacaggcattttgcctggct
gtgagccatgccacaagaaggtgtgtgcccatggcacatgccagcccagc
agccaggcaggcttcacctgcgagtgccaggaaggatggatggggcccct
ctgtgaccaacggaccaatgacccttgccttggaaataaatgcgtacatg
gcacctgcttgcccatcaatgcgttctcctacagctgtaagtgcttggag
ggccatggaggtgtcctctgtgatgaagaggaggatctgtttaacccatg
ccaggcgatcaagtgcaagcacgggaagtgcaggctttcaggtctggggc
agccctactgtgaatgcagcagtggatacacgggggacagctgtgatcga
gaaatctcttgtcgaggggaaaggataagagattattaccaaaagcagca
gggctatgctgcttgccaaacaaccaagaaggtgtcccgattagagtgca
gaggtgggtgtgcaggagggcagtgctgtggaccgctgaggagcaagcgg
cggaaatactctttcgaatgcactgacggctcctcctttgtggacgaggt
tgagaaagtggtgaagtgcggctgtacgaggtgtgtgtcctaaacacact
cccggcagctctgtctttggaaaaggttgtatacttctgaccatgtggga
ctaatgaatgcttcatagtggaaatatttgaaatatattgtaaaatacag
aacagacttatttttattatgagaataaagactttttttctgcatttg.

[0278] In another embodiment, the SLIT2 protein is encoded by a nucleic acid molecule having a sequence set forth in GenBank Accession No. NM_{—}004787. In another embodiment, the SLIT2 protein is encoded by a nucleic acid molecule having a sequence selected from those set forth in GenBank Accession No. AB017168 and AK027326. In another embodiment, the SLIT2 protein has an AA sequence set forth in 1 of the above GenBank entries. In another embodiment, the SLIT2 protein is encoded by any other SLIT2 gene sequence known in the art. In another embodiment, the SLIT2 protein is any other SLIT2 protein known in the art. In another embodiment, the TVM is an isoform of a SLIT2 protein. In another embodiment, the TVM is a homologue of a SLIT2 protein. In another embodiment, the TVM is a variant of a SLIT2 protein. In another embodiment, the TVM is a fragment of a SLIT2 protein. In another embodiment, the TVM is a fragment of an isoform, homologue, or variant of a SLIT2 protein. Each possibility represents another embodiment of the present invention.

[0279] In another embodiment, the TVM is SLC11A1 (Solute carrier family 11; proton-coupled divalent metal ion transporters, member 1; NRAMP). In another embodiment, the TVM is a nucleotide molecule encoding SLCA1. In another embodiment, the TVM is an isoform of a SLC11A1 protein. In another embodiment, the TVM is a homologue of a SLC11A1 protein. In another embodiment, the TVM is a variant of a SLC11A1 protein. In another embodiment, the TVM is a fragment of a SLC11A1 protein. In another embodiment, the TVM is a fragment of an isoform, homologue, or variant of a SLC11A1 protein. Each possibility represents another embodiment of the present invention.

[0280] In another embodiment, the TVM is SEC23B. In another embodiment, the TVM is a nucleotide molecule encoding SEC23B. In another embodiment, the TVM is an isoform of a SEC23B protein. In another embodiment, the TVM is a homologue of a SEC23B protein. In another embodiment, the TVM is a variant of a SEC23B protein. In another embodiment, the TVM is a fragment of a SEC23B protein. In another embodiment, the TVM is a fragment of an isoform, homologue, or variant of a SEC23B protein. Each possibility represents another embodiment of the present invention.

[0281] In another embodiment, the TVM is DKFZp762E1312. In another embodiment, the TVM is a nucleotide molecule encoding DKFZp762E1312. In another embodiment, the TVM is an isoform of a DKFZp762E1312 protein. In another embodiment, the TVM is a homologue of a DKFZp762E1312 protein. In another embodiment, the TVM is a variant of a DKFZp762E1312 protein. In another embodiment, the TVM is a fragment of a DKFZp762E1312 protein. In another embodiment, the TVM is a fragment of an isoform, homologue, or variant of a DKFZp762E1312 protein. Each possibility represents another embodiment of the present invention.

[0282] In another embodiment, the TVM is KIAA1892. In another embodiment, the TVM is a nucleotide molecule encoding KIAA1892. In another embodiment, the TVM is a protein encoded by KIAA1892. In another embodiment, the TVM is an isoform of a KIAA1892 protein. In another embodiment, the TVM is a homologue of a KIAA1892 protein. In another embodiment, the TVM is a variant of a KIAA1892 protein. In another embodiment, the TVM is a fragment of a KIAA1892 protein. In another embodiment, the TVM is a fragment of an isoform, homologue, or variant of a KIAA1892 protein. Each possibility represents another embodiment of the present invention.

[0283] In another embodiment, the TVM is MS4A6A (Membrane-spanning 4-domains, subfamily A, member 6A). In another embodiment, the TVM is a nucleotide molecule encoding MS4A6A. In another embodiment, the TVM is an isoform of a MS4A6A protein. In another embodiment, the TVM is a homologue of a MS4A6A protein. In another embodiment, the TVM is a variant of a MS4A6A protein. In another embodiment, the TVM is a fragment of a MS4A6A protein. In another embodiment, the TVM is a fragment of an isoform, homologue, or variant of a MS4A6A protein. Each possibility represents another embodiment of the present invention.

[0284] In another embodiment, the TVM is KCNE3 (Potassium voltage-gated channel, Isk-related family, member 3). In another embodiment, the TVM is a nucleotide molecule encoding KCNE3. In another embodiment, the TVM is an isoform of a KCNE3 protein. In another embodiment, the TVM is a homologue of a KCNE3 protein. In another embodiment, the TVM is a variant of a KCNE3 protein. In another embodiment, the TVM is a fragment of a KCNE3 protein. In another embodiment, the TVM is a fragment of an isoform, homologue, or variant of a KCNE3 protein. Each possibility represents another embodiment of the present invention.

[0285] In another embodiment, the TVM is KCNE4 (Potassium voltage-gated channel, Isk-related family, member 4). In another embodiment, the TVM is a nucleotide molecule encoding KCNE4. In another embodiment, the TVM is an isoform of a KCNE4 protein. In another embodiment, the TVM is a homologue of a KCNE4 protein. In another embodiment, the TVM is a variant of a KCNE4 protein. In another embodiment, the TVM is a fragment of a KCNE4 protein. In another embodiment, the TVM is a fragment of an isoform, homologue, or variant of a KCNE4 protein. Each possibility represents another embodiment of the present invention.

[0286] In another embodiment, the TVM is SDC1 (Syndecan 1). In another embodiment, the TVM is a nucleotide molecule encoding SDC1. In another embodiment, the TVM is an isoform of a SDC1 protein. In another embodiment, the TVM is a homologue of a SDC1 protein. In another embodiment, the TVM is a variant of a SDC1 protein. In another embodiment, the TVM is a fragment of a SDC1 protein. In another embodiment, the TVM is a fragment of an isoform, homologue, or variant of a SDC1 protein. Each possibility represents another embodiment of the present invention.

[0287] In another embodiment, the TVM is ST14 (Suppression of tumorigenicity 14 (colon carcinoma)). In another embodiment, the TVM is a nucleotide molecule encoding ST14. In another embodiment, the TVM is an isoform of a ST14 protein. In another embodiment, the TVM is a homologue of a ST14 protein. In another embodiment, the TVM is a variant of a ST14 protein. In another embodiment, the TVM is a fragment of a ST14 protein. In another embodiment, the TVM is a fragment of an isoform, homologue, or variant of a ST14 protein. Each possibility represents another embodiment of the present invention.

[0288] In another embodiment, the TVM is CDCP1 (CUB domain containing protein 1). In another embodiment, the TVM is a nucleotide molecule encoding CDCP1. In another embodiment, the CDCP1 nucleotide is a short isoform of CDCP1. In another embodiment, the CDCP1 nucleotide is a long isoform of CDCP1. In another embodiment, the CDCP1 protein is encoded by a nucleic acid molecule having the sequence:

(SEQ ID No: 119)

gggcggggctcgggccggtccgcccgcgcgcaggtgagtgagccagggcg
gagcgcagctgcgccgggcttgggcgcctggggccgccgctccccaccgt
cgttttccccaccgaggccgaggcgtcccggagtcatggccggcctgaac
tgcggggtctctatcgcactgctaggggttctgctgctgggtgcggcgcg
cctgccgcgcggggcagaagcttttgagattgctctgccacgagaaagca
acattacagttctcataaagctggggaccccgactctgctggcaaaaccc
tgttacatcgtcatttctaaaagacatataaccatgttgtccatcaagtc
tggagaaagaatagtctttacctttagctgccagagtcctgagaatcact
ttgtcatagagatccagaaaaatattgactgtatgtcaggcccatgtcct
tttggggaggttcagcttcagccctcgacatcgttgttgcctaccctcaa
cagaactttcatctgggatgtcaaagctcataagagcatcggtttagagc
tgcagttttccatccctcgcctgaggcagatcggtccgggtgagagctgc
ccagacggagtcactcactccatcagcggccgaatcgatgccaccgtggt
caggatcggaaccttctgcagcaatggcactgtgtcccggatcaagatgc
aagaaggagtgaaaatggccttacacctcccatggttccaccccagaaat
gtctccggcttcagcattgcaaaccgctcatctataaaacgtctgtgcat
catcgagtctgtgtttgagggtgaaggctcagcaaccctgatgtctgcca
actacccagaaggcttccctgaggatgagctcatgacgtggcagtttgtc
gttcctgcacacctgcgggccagcgtctccttcctcaacttcaacctctc
caactgtgagaggaaggaggagcgggttgaatactacatcccgggctcca
ccaccaaccccgaggtgttcaagctggaggacaagcagcctgggaacatg
gcggggaacttcaacctctctctgcaaggctgtgaccaagatgcccaaag
tccagggatcctccggctgcagttccaagttttggtccaacatccacaaa
atgaaagcagtgagtgagccccactttcctttttcttcctcctccagcac
cttcgttgtttcctgggtagtctgcctgggtgaggctcccttcctgtttc
tcatctgtggcttctgaaacacttagactctggacccagcaagagtttca
ggaagtgggttgctaggcagttagacaggcttgttggtgaacacccggta
tgtagttccatttcagcacaataaaaagaaatcttgcattcaaaaaaaaa
aaaaaaaaaa.

[0289] In another embodiment, the CDCP1 protein is encoded by a nucleic acid molecule with a sequence set forth in SEQ ID No: 268. In another embodiment, the CDCP1 protein is a short isoform of CDCP1. In another embodiment, the CDCP1 protein is a long isoform of CDCP1. In another embodiment, the CDCP1 protein is encoded by a nucleic acid molecule having a sequence set forth in GenBank Accession No. AK026329. In another embodiment, the sequence of the CDCP1-encoding nucleotide is set forth in GenBank Accession No. NM_{—}178181. In another embodiment, the sequence of the CDCP1-encoding nucleotide is set forth in GenBank Accession No. BC021099. In another embodiment, the sequence of the CDCP1-encoding nucleotide is set forth in GenBank Accession No. BC069254. In another embodiment, the sequence of the CDCP1-encoding nucleotide is set forth in Genbank Accession No. AY026461. In another embodiment, the sequence of the CDCP1-encoding nucleotide is set forth in GenBank Accession No. AF468010. In another embodiment, the sequence of the CDCP1-encoding nucleotide is set forth in GenBank Accession No. AY167484. In another embodiment, the CDCP1 protein has an AA sequence set forth in 1 of the above GenBank entries. In another embodiment, the CDCP1 protein is encoded by any other CDCP1 gene sequence known in the art. In another embodiment, the CDCP1 protein is any other CDCP1 protein known in the art. In another embodiment, the TVM is an isoform of a CDCP1 protein. In another embodiment, the TVM is a homologue of a CDCP1 protein. In another embodiment, the TVM is a variant of a CDCP1 protein. In another embodiment, the TVM is a fragment of a CDCP1 protein. In another embodiment, the TVM is a fragment of an isoform, homologue, or variant of a CDCP1 protein. Each possibility represents another embodiment of the present invention.

[0290] In another embodiment, the TVM is a homologue of a CDCP1 protein. In another embodiment, the TVM is a variant of a CDCP1 protein. In another embodiment, the TVM is a fragment of a CDCP1 protein. In another embodiment, the TVM is a fragment of an isoform, homologue, or variant of a CDCP1 protein. Each possibility represents another embodiment of the present invention.

[0291] In another embodiment, the TVM is MOBK1B (C2orf6; MOB1, Mps One Binder kinase activator-like 1B). In another embodiment, the TVM is an isoform of a MOBK1B protein. In another embodiment, the TVM is a homologue of a MOBK1B protein. In another embodiment, the TVM is a variant of a MOBK1B protein. In another embodiment, the TVM is a fragment of a MOBK1B protein. In another embodiment, the TVM is a fragment of an isoform, homologue, or variant of a MOBK1B protein. Each possibility represents another embodiment of the present invention.

[0292] In another embodiment, the TVM is a protein encoded by C14orf28. In another embodiment, the TVM is C14orf28. In another embodiment, the TVM is a nucleotide molecule encoding a protein encoded by C14orf28. In another embodiment, the TVM is an isoform of a C14orf28 protein. In another embodiment, the TVM is a homologue of a C14orf28 protein. In another embodiment, the TVM is a variant of a C14orf28 protein. In another embodiment, the TVM is a fragment of a C14orf28 protein. In another embodiment, the TVM is a fragment of an isoform, homologue, or variant of a C14orf28 protein. Each possibility represents another embodiment of the present invention.

[0293] In another embodiment, the TVM is PCDHB2 (Protocadherin beta 2). In another embodiment, the TVM is a nucleotide molecule encoding PCDHB2. In another embodiment, the TVM is an isoform of a PCDHB2 protein. In another embodiment, the TVM is a homologue of a PCDHB2 protein. In another embodiment, the TVM is a variant of a PCDHB2 protein. In another embodiment, the TVM is a fragment of a PCDHB2 protein. In another embodiment, the TVM is a fragment of an isoform, homologue, or variant of a PCDHB2 protein. Each possibility represents another embodiment of the present invention.

[0294] In another embodiment, the TVM is GPR105 (Purinergic receptor P2Y, G-protein coupled, 14). In another embodiment, the TVM is a nucleotide molecule encoding GPR105. In another embodiment, the TVM is an isoform of a GPR105 protein. In another embodiment, the TVM is a homologue of a GPR105 protein. In another embodiment, the TVM is a variant of a GPR105 protein. In another embodiment, the TVM is a fragment of a GPR105 protein. In another embodiment, the TVM is a fragment of an isoform, homologue, or variant of a GPR105 protein. Each possibility represents another embodiment of the present invention.

[0295] In another embodiment, the TVM is CSPG2 (chondroitin sulfate proteoglycan 2). In another embodiment, the TVM is a nucleotide molecule encoding CSPG2. In another embodiment, the TVM is an isoform of a CSPG2 protein. In another embodiment, the TVM is a homologue of a CSPG2 protein. In another embodiment, the TVM is a variant of a CSPG2 protein. In another embodiment, the TVM is a fragment of a CSPG2 protein. In another embodiment, the TVM is a fragment of an isoform, homologue, or variant of a CSPG2 protein. Each possibility represents another embodiment of the present invention.

[0296] In another embodiment, the TVM is ESM1 (Endothelial cell-specific molecule 1). In another embodiment, the TVM is a nucleotide molecule encoding ESM1. In another embodiment, the TVM is an isoform of a ESM1 protein. In another embodiment, the TVM is a homologue of a ESM1 protein. In another embodiment, the TVM is a variant of a ESM1 protein. In another embodiment, the TVM is a fragment of a ESM1 protein. In another embodiment, the TVM is a fragment of an isoform, homologue, or variant of a ESM1 protein. Each possibility represents another embodiment of the present invention.

[0297] In another embodiment, the TVM is WFDC2 (WAP four-disulfide core domain 2). In another embodiment, the TVM is a nucleotide molecule encoding WFDC2. In another embodiment, the TVM is an isoform of a WFDC2 protein. In another embodiment, the TVM is a homologue of a WFDC2 protein. In another embodiment, the TVM is a variant of a WFDC2 protein. In another embodiment, the TVM is a fragment of a WFDC2 protein. In another embodiment, the TVM is a fragment of an isoform, homologue, or variant of a WFDC2 protein. Each possibility represents another embodiment of the present invention.

[0298] In another embodiment, the TVM is SPP1 (Secreted phosphoprotein 1 (osteopontin, bone sialoprotein I, early T-lymphocyte activation 1)). In another embodiment, the TVM is a nucleotide molecule encoding SPP1. In another embodiment, the TVM is an isoform of a SPP1 protein. In another embodiment, the TVM is a homologue of a SPP1 protein. In another embodiment, the TVM is a variant of a SPP1 protein. In another embodiment, the TVM is a fragment of a SPP1 protein. In another embodiment, the TVM is a fragment of an isoform, homologue, or variant of a SPP1 protein. Each possibility represents another embodiment of the present invention.

[0299] In another embodiment, the TVM is a TM protein listed in FIG. 11. In another embodiment, the TVM is MGAT4A. In another embodiment, the TVM is a nucleotide molecule encoding MGAT4A. In another embodiment, the TVM is AFAP. In another embodiment, the TVM is a nucleotide molecule encoding AFAP. In another embodiment, the TVM is CXCR4. In another embodiment, the TVM is a nucleotide molecule encoding CXCR4. In another embodiment, the TVM is UCP2. In another embodiment, the TVM is a nucleotide molecule encoding UCP2. In another embodiment, the TVM is TWIST. In another embodiment, the TVM is a nucleotide molecule encoding TWIST. In another embodiment, the TVM is SLC2A3. In another embodiment, the TVM is a nucleotide molecule encoding SLC2A3. In another embodiment, the TVM is MYO1B. In another embodiment, the TVM is a nucleotide molecule encoding MYO1B. In another embodiment, the TVM is COL4A2. In another embodiment, the TVM is a nucleotide molecule encoding COL4A2. In another embodiment, the TVM is MGC4677. In another embodiment, the TVM is a nucleotide molecule encoding MGC4677. In another embodiment, the TVM is G1P2. In another embodiment, the TVM is a nucleotide molecule encoding G1P2. In another embodiment, the TVM is BHLHB3. In another embodiment, the TVM is a nucleotide molecule encoding BHLHB3. In another embodiment, the TVM is NEDL2. In another embodiment, the TVM is a nucleotide molecule encoding NEDL2. In another embodiment, the TVM is ITGA1. In another embodiment, the TVM is a nucleotide molecule encoding ITGA1. Each possibility represents a separate embodiment of the present invention.

[0300] In another embodiment, the TVM is a TM protein listed in FIG. 12. In another embodiment, the TVM is MUC16. In another embodiment, the TVM is a nucleotide molecule encoding MUC16. In another embodiment, the TVM is FLJ20171. In another embodiment, the TVM is a nucleotide molecule encoding FLJ20171. In another embodiment, the TVM is TAP1. In another embodiment, the TVM is a nucleotide molecule encoding TAP1. In another embodiment, the TVM is C11orf5. In another embodiment, the TVM is a nucleotide molecule encoding C11orf5. In another embodiment, the TVM is SLC30A5. In another embodiment, the TVM is a nucleotide molecule encoding SLC30A5. In another embodiment, the TVM is CST5. In another embodiment, the TVM is a nucleotide molecule encoding CST5. In another embodiment, the TVM is TNFAIP1. In another embodiment, the TVM is a nucleotide molecule encoding TNFAIP1. In another embodiment, the TVM is AKAP8. In another embodiment, the TVM is a nucleotide molecule encoding AKAP8. In another embodiment, the TVM is PSAT1. In another embodiment, the TVM is a nucleotide molecule encoding PSAT1. In another embodiment, the TVM is FLJ20171. In another embodiment, the TVM is a nucleotide molecule encoding FLJ20171. In another embodiment, the TVM is RP2. In another embodiment, the TVM is a nucleotide molecule encoding RP2. In another embodiment, the TVM is LOC132671. In another embodiment, the TVM is a nucleotide molecule encoding LOC132671. In another embodiment, the TVM is HES2. In another embodiment, the TVM is a nucleotide molecule encoding HES2. In another embodiment, the TVM is APCDD1. In another embodiment, the TVM is a nucleotide molecule encoding APCDD1. In another embodiment, the TVM is LOC286334. In another embodiment, the TVM is a nucleotide molecule encoding LOC286334. In another embodiment, the TVM is FLJ11526. In another embodiment, the TVM is a nucleotide molecule encoding FLJ11526. In another embodiment, the TVM is KIAA2022. In another embodiment, the TVM is a nucleotide molecule encoding KIAA2022. In another embodiment, the TVM is MGC3032. In another embodiment, the TVM is a nucleotide molecule encoding MGC3032. In another embodiment, the TVM is FLJ22795. In another embodiment, the TVM is a nucleotide molecule encoding FLJ22795. In another embodiment, the TVM is KIAA1909. In another embodiment, the TVM is a nucleotide molecule encoding KIAA1909. In another embodiment, the TVM is FLJ30277. In another embodiment, the TVM is a nucleotide molecule encoding FLJ30277. In another embodiment, the TVM is LOC284801. In another embodiment, the TVM is a nucleotide molecule encoding LOC284801. In another embodiment, the TVM is LOC158135. In another embodiment, the TVM is a nucleotide molecule encoding LOC158135. In another embodiment, the TVM is LOC254531. In another embodiment, the TVM is a nucleotide molecule encoding LOC254531. In another embodiment, the TVM is OR7E47P. In another embodiment, the TVM is a nucleotide molecule encoding OR7E47P. In another embodiment, the TVM is UBPH. In another embodiment, the TVM is a nucleotide molecule encoding UBPH. In another embodiment, the TVM is FLJ35801. In another embodiment, the TVM is a nucleotide molecule encoding FLJ35801. In another embodiment, the TVM is LOC150271. In another embodiment, the TVM is a nucleotide molecule encoding LOC150271. In another embodiment, the TVM is SIPA1L3. In another embodiment, the TVM is a nucleotide molecule encoding SIPA1L3. In another embodiment, the TVM is LOC158563. In another embodiment, the TVM is a nucleotide molecule encoding LOC158563. In another embodiment, the TVM is NAV1. In another embodiment, the TVM is a nucleotide molecule encoding NAV1. In another embodiment, the TVM is LOC401022. In another embodiment, the TVM is a nucleotide molecule encoding LOC401022. In another embodiment, the TVM is C9orf113. In another embodiment, the TVM is a nucleotide molecule encoding C9orf113. In another embodiment, the TVM is GPT2. In another embodiment, the TVM is a nucleotide molecule encoding GPT2. In another embodiment, the TVM is PHLDB1. In another embodiment, the TVM is a nucleotide molecule encoding PHLDB1. In another embodiment, the TVM is FLJ12748. In another embodiment, the TVM is a nucleotide molecule encoding FLJ12748. In another embodiment, the TVM is LOC130355. In another embodiment, the TVM is a nucleotide molecule encoding LOC130355. In another embodiment, the TVM is BECN1. In another embodiment, the TVM is a nucleotide molecule encoding BECN1. In another embodiment, the TVM is LOC283713. In another embodiment, the TVM is a nucleotide molecule encoding LOC283713. Each possibility represents a separate embodiment of the present invention.

[0301] In another embodiment, the TVM is a TM protein listed in Table 6. In another embodiment, the TVM is a TM protein listed in Table 7. In another embodiment, the TVM is a plasma-membrane-associated (PM) protein listed in Table 6. In another embodiment, the TVM is a PM protein listed in Table 7. In another embodiment, a PM protein of the present invention is a TM protein. In another embodiment, the PM protein is associated with the intracellular face of the PM. In another embodiment, the PM protein is associated with the extracellular face of the PM. Each possibility represents a separate embodiment of the present invention.

[0302] In another embodiment, the TVM is FAD104 (FNDC3B; Fibronectin type III domain containing 3B). In another embodiment, the TVM is a nucleotide molecule encoding FAD104. In another embodiment, the TVM is WARP (Von Willebrand factor A domain containing 1). In another embodiment, the TVM is a nucleotide molecule encoding WARP. In another embodiment, the TVM is B-cell receptor-associated protein 29 (BCAP29). In another embodiment, the TVM is a nucleotide molecule encoding BCAP29. In another embodiment, the TVM is CDH1 (Cadherin 1, type 1, E-cadherin (epithelial). In another embodiment, the TVM is a nucleotide molecule encoding CDH1. In another embodiment, the TVM is FLJ10826 (OGFOD1; 2-oxoglutarate and iron-dependent oxygenase domain containing 1). In another embodiment, the TVM is a nucleotide molecule encoding FLJ10826. In another embodiment, the TVM is OPN3 (Opsin 3; encephalopsin, panopsin). In another embodiment, the TVM is a nucleotide molecule encoding OPN3. In another embodiment, the TVM is HIATL2 (Hippocampus abundant gene transcript-like 2). In another embodiment, the TVM is a nucleotide molecule encoding HIATL2. In another embodiment, the TVM is IL28RA (Interleukin 28 receptor, alpha; interferon, lambda receptor). In another embodiment, the TVM is a nucleotide molecule encoding IL28RA. In another embodiment, the TVM is TMEM19 (Transmembrane protein 19). In another embodiment, the TVM is a nucleotide molecule encoding TMEM19. In another embodiment, the TVM is C10orf69 (SPFH domain family, member 1). In another embodiment, the TVM is a nucleotide molecule encoding C10orf69. In another embodiment, the TVM is FRAP1 (FK506 binding protein 12-rapamycin associated protein 1). In another embodiment, the TVM is a nucleotide molecule encoding FRAP1. In another embodiment, the TVM is CKLFSF6 (CKLF-like MARVEL transmembrane domain containing 6). In another embodiment, the TVM is a nucleotide molecule encoding CKLFSF6. In another embodiment, the TVM is MPHOSPH9 (M-phase phosphoprotein 9). In another embodiment, the TVM is a nucleotide molecule encoding MPOHSPH9. In another embodiment, the TVM is CLST11240 (HIGD1B; HIG1 domain family, member 1B). In another embodiment, the TVM is a nucleotide molecule encoding CLST11240. In another embodiment, the TVM is SGPP2 (Sphingosine-1-phosphate phosphotase 2). In another embodiment, the TVM is a nucleotide molecule encoding SGPP2. In another embodiment, the TVM is SLC03A1 (Solute carrier organic anion transporter family, member 3A 1). In another embodiment, the TVM is a nucleotide molecule encoding SLC03A1. In another embodiment, the TVM is LOC51136 (PTD016 protein). In another embodiment, the TVM is a nucleotide molecule encoding LOC51136. In another embodiment, the TVM is DKFZp56411922 (MXRA5 (Matrix-remodelling associated 5). In another embodiment, the TVM is a nucleotide molecule encoding DKFZp564I1922. In another embodiment, the TVM is CALM3 (Calmodulin 3; phosphorylase kinase, delta). In another embodiment, the TVM is a nucleotide molecule encoding CALM3. In another embodiment, the TVM is MGC34647. In another embodiment, the TVM is a nucleotide molecule encoding MGC34647. In another embodiment, the TVM is MUC1 (Mucin 1, transmembrane). In another embodiment, the TVM is a nucleotide molecule encoding MUC1. In another embodiment, the TVM is SLC30A6 (Solute carrier family 30 (zinc transporter), member 6). In another embodiment, the TVM is a nucleotide molecule encoding SLC30A6. In another embodiment, the TVM is TLCD1 (LOC116238). In another embodiment, the TVM is a nucleotide molecule encoding TLCD1. In another embodiment, the TVM is SPTB (Spectrin, beta, erythrocytic (includes spherocytosis, clinical type I)). In another embodiment, the TVM is a nucleotide molecule encoding SPTB. In another embodiment, the TVM is FNDC3 (Fibronectin type III domain containing 3A). In another embodiment, the TVM is a nucleotide molecule encoding FNDC3. In another embodiment, the TVM is SPRY1 (Sprouty homolog 1, antagonist of FGF signaling (Drosophila). In another embodiment, the TVM is a nucleotide molecule encoding SPRY1. In another embodiment, the TVM is MME (Membrane metallo-endopeptidase; neutral endopeptidase, enkephalinase, CALLA, CD10). In another embodiment, the TVM is a nucleotide molecule encoding MME. In another embodiment, the TVM is INSR (Insulin receptor). In another embodiment, the TVM is a nucleotide molecule encoding INSR. In another embodiment, the TVM is LPPR4 (Plasticity related gene 1). In another embodiment, the TVM is a nucleotide molecule encoding LPPR1. In another embodiment, the TVM is a C14orf100-encoded protein. In another embodiment, the TVM is a nucleotide molecule encoding a C14orf100-encoded protein. In another embodiment, the TVM is a C14orf100 nucleotide molecule. In another embodiment, the TVM is SLC9A5 (Solute carrier family 9 (sodium/hydrogen exchanger), member 5). In another embodiment, the TVM is a nucleotide molecule encoding SLC9A5. In another embodiment, the TVM is SCGB2A1 (Secretoglobin, family 2A, member 1). In another embodiment, the TVM is a nucleotide molecule encoding SCGB2A1. In another embodiment, the TVM is FLT1 (Fms-related tyrosine kinase 1 (vascular endothelial growth factor/vascular permeability factor receptor). In another embodiment, the TVM is a nucleotide molecule encoding FLT1. In another embodiment, the TVM is a nucleotide molecule encoding MOBK1B. In another embodiment, the TVM is TMEM2 (Transmembrane protein 2). In another embodiment, the TVM is a nucleotide molecule encoding TMEM2. In another embodiment, the TVM is TMEM8 (Transmembrane protein 8; five membrane-spanning domains). In another embodiment, the TVM is a nucleotide molecule encoding TMEM8. In another embodiment, the TVM is SLC5A4 (Solute carrier family 5 (low affinity glucose cotransporter), member 4). In another embodiment, the TVM is a nucleotide molecule encoding SLC5A4. In another embodiment, the TVM is MEST (Mesoderm specific transcript homolog (mouse). In another embodiment, the TVM is a nucleotide molecule encoding MEST. In another embodiment, the TVM is CHODL (Chondrolectin). In another embodiment, the TVM is a nucleotide molecule encoding CHODL. In another embodiment, the TVM is TRIO (Triple functional domain (PTPRF interacting)). In another embodiment, the TVM is a nucleotide molecule encoding TRIO. In another embodiment, the TVM is IL10RA (Interleukin 10 receptor, alpha). In another embodiment, the TVM is a nucleotide molecule encoding IL10RA. In another embodiment, the TVM is LGALS3BP (Lectin, galactoside-binding, soluble, 3 binding protein). In another embodiment, the TVM is a nucleotide molecule encoding LGALS3BP. In another embodiment, the TVM is STK4 (Serine/threonine kinase 4). In another embodiment, the TVM is a nucleotide molecule encoding STK4. In another embodiment, the TVM is ERBB3 (V-erb-b2 erythroblastic leukemia viral oncogene homolog 3 (avian). In another embodiment, the TVM is a nucleotide molecule encoding ERBB3. In another embodiment, the TVM is KIAA1024. In another embodiment, the TVM is a nucleotide molecule encoding KIAA1024. In another embodiment, the TVM is KIAA1906. In another embodiment, the TVM is a nucleotide molecule encoding KIAA1906. In another embodiment, the TVM is F3 (Coagulation factor III (thromboplastin, tissue factor)). In another embodiment, the TVM is a nucleotide molecule encoding F3. In another embodiment, the TVM is KIAA0703. In another embodiment, the TVM is a nucleotide molecule encoding KIAA0703. In another embodiment, the TVM is C1orf10 (CRNN; Cornulin). In another embodiment, the TVM is a nucleotide molecule encoding C1orf10. In another embodiment, the TVM is POLYDOM (SVEP1 (Sushi, von Willebrand factor type A, EGF and pentraxin domain containing 1). In another embodiment, the TVM is a nucleotide molecule encoding POLYDOM. In another embodiment, the TVM is TUBAL3 (Tubulin, alpha-like 3). In another embodiment, the TVM is a nucleotide molecule encoding TUBAL3. In another embodiment, the TVM is IL7R (Interleukin 7 receptor). In another embodiment, the TVM is a nucleotide molecule encoding IL7R. In another embodiment, the TVM is ARHGAP18 (Rho GTPase activating protein 18). In another embodiment, the TVM is a nucleotide molecule encoding ARHGAP18. In another embodiment, the TVM is GRM1 (Glutamate receptor, metabotropic 1). In another embodiment, the TVM is a nucleotide molecule encoding GRM1. In another embodiment, the TVM is PREX1 (Phosphatidyl-inositol 3,4,5-trisphosphate-dependent RAC exchanger 1). In another embodiment, the TVM is a nucleotide molecule encoding PREX1. In another embodiment, the TVM is MUC3A (Mucin 3A, intestinal). In another embodiment, the TVM is a nucleotide molecule encoding MUC3A. In another embodiment, the TVM is EPSTI1 (Epithelial stromal interaction 1 (breast)). In another embodiment, the TVM is a nucleotide molecule encoding EPSTI1. In another embodiment, the TVM is UBE2J1 (Ubiquitin-conjugating enzyme E2, J1 (UBC6 homolog, yeast). In another embodiment, the TVM is a nucleotide molecule encoding UBE2J1. Each possibility represents a separate embodiment of the present invention.

[0303] As provided herein, the long isoform of ADAM12 was particularly efficacious, under the conditions utilized, in distinguishing between tumor vasculature and healthy tissue (Example 20). In another embodiment, the ADAM12 nucleotide of methods and compositions of the present invention is a long isoform thereof. In another embodiment, the ADAM12 nucleotide is a short isoform. In another embodiment, the ADAM12 nucleotide is any other ADAM12 nucleotide known in the art. Each possibility represents a separate embodiment of the present invention.

[0304] An ADAM12 protein of methods and compositions of the present invention is, in another embodiment, a long isoform thereof. In another embodiment, the ADAM12 protein is a short isoform. In another embodiment, the ADAM12 protein is any other ADAM12 protein known in the art. Each possibility represents a separate embodiment of the present invention.

[0305] As provided herein, the short isoform of CDCP1-CUB was particularly efficacious, under the conditions utilized, in distinguishing between tumor vasculature and healthy tissue (Example 20). In another embodiment, the CDCP1-CUB nucleotide of methods and compositions of the present invention is a short isoform thereof. In another embodiment, the CDCP1-CUB nucleotide is a long isoform. In another embodiment, the CDCP1-CUB nucleotide is any other CDCP1-CUB nucleotide known in the art. Each possibility represents a separate embodiment of the present invention.

[0306] A CDCP1-CUB protein of methods and compositions of the present invention is, in another embodiment, a short isoform thereof. In another embodiment, the CDCP1-CUB protein is a long isoform. In another embodiment, the CDCP1-CUB protein is any other CDCP1-CUB protein known in the art. Each possibility represents a separate embodiment of the present invention.

[0307] The cancer treated by a method of present invention is, in another embodiment, a cervical cancer tumor. In another embodiment, the cancer is a head and neck cancer tumor. In another embodiment, the cancer is a breast cancer tumor. In another embodiment, the cancer is an ano-genital cancer tumor. In another embodiment, the cancer is a melanoma. In another embodiment, the cancer is a sarcoma. In another embodiment, the cancer is a carcinoma. In another embodiment, the cancer is a lymphoma. In another embodiment, the cancer is a leukemia. In another embodiment, the cancer is mesothelioma. In another embodiment, the cancer is a glioma. In another embodiment, the cancer is a germ cell tumor. In another embodiment, the cancer is a choriocarcinoma. In another embodiment, the cancer is pancreatic cancer. In another embodiment, the cancer is ovarian cancer. In another embodiment, the cancer is gastric cancer. In another embodiment, the cancer is a carcinomatous lesion of the pancreas. In another embodiment, the cancer is pulmonary adenocarcinoma. In another embodiment, the cancer is colorectal adenocarcinoma. In another embodiment, the cancer is pulmonary squamous adenocarcinoma. In another embodiment, the cancer is gastric adenocarcinoma. In another embodiment, the cancer is an ovarian surface epithelial neoplasm (e.g. a benign, proliferative or malignant variety thereof). In another embodiment, the cancer is an oral squamous cell carcinoma. In another embodiment, the cancer is non small-cell lung carcinoma. In another embodiment, the cancer is an endometrial carcinoma. In another embodiment, the cancer is a bladder cancer. In another embodiment, the cancer is a head and neck cancer. In another embodiment, the cancer is a prostate carcinoma. In another embodiment, the cancer is an acute myelogenous leukemia (AML). In another embodiment, the cancer is a myelodysplastic syndrome (MDS). In another embodiment, the cancer is a non-small cell lung cancer (NSCLC). In another embodiment, the cancer is a Wilms' tumor. In another embodiment, the cancer is a leukemia. In another embodiment, the cancer is a lymphoma. In another embodiment, the cancer is a desmoplastic small round cell tumor. In another embodiment, the cancer is a mesothelioma (e.g. malignant mesothelioma). In another embodiment, the cancer is a gastric cancer. In another embodiment, the cancer is a colon cancer. In another embodiment, the cancer is a lung cancer. In another embodiment, the cancer is a breast cancer. In another embodiment, the cancer is a germ cell tumor. In another embodiment, the cancer is an ovarian cancer. In another embodiment, the cancer is a uterine cancer. In another embodiment, the cancer is a thyroid cancer. In another embodiment, the cancer is a hepatocellular carcinoma. In another embodiment, the cancer is a thyroid cancer. In another embodiment, the cancer is a liver cancer. In another embodiment, the cancer is a renal cancer. In another embodiment, the cancer is a kaposis. In another embodiment, the cancer is a sarcoma. In another embodiment, the cancer is another carcinoma or sarcoma. Each possibility represents a separate embodiment of the present invention.

[0308] In another embodiment of methods and compositions of the present invention, a subject is contacted with a nucleotide molecule, antibody, ligand, or composition utilized in a method of the present invention. In another embodiment, a solid tumor is contacted with the nucleotide molecule, antibody, ligand, or composition. In another embodiment, an ovarian tumor is contacted with the nucleotide molecule, antibody, ligand, or composition. In another embodiment, a breast cancer tumor is contacted with the nucleotide molecule, antibody, ligand, or composition. In another embodiment, a renal tumor is contacted with the nucleotide molecule, antibody, ligand, or composition. In another embodiment, any other type of solid tumor known in the art is contacted with the nucleotide molecule, antibody, ligand, or composition. Each possibility represents a separate embodiment of the present invention.

[0309] In another embodiment, a transmembrane (TM) protein of the present invention is accessible to antibodies and/or non-cell membrane-permeable agents and ligands. In another embodiment, a plasma membrane-associated protein of the present invention is accessible to antibodies and/or non-cell membrane-permeable agents and ligands. In another embodiment, a plasma membrane-associated protein of the present invention is a TM protein. In another embodiment, the plasma membrane-associated protein is an extracellular peripheral membrane protein. In another embodiment, the plasma membrane-associated protein is an intracellular peripheral membrane protein. Each possibility represents a separate embodiment of the present invention.

[0310] In another embodiment, a TVM of the present invention is specific for vasculogenesis. In another embodiment, a TVM is associated with vasculogenesis. “Vasculogenesis” refers, in another embodiment, to recruitment of endothelial progenitors of hematopoietic origin.” In another embodiment, the term refers to de novo formation of tumor vasculature. In another embodiment, a method of present invention is capable to detecting or localizing vasculogenesis. In another embodiment, a method of present invention is capable to inhibiting vasculogenesis. Each possibility represents a separate embodiment of the present invention.

[0311] In another embodiment, the TVM is a secreted protein. In another embodiment, the TVM is an extracellular matrix (ECM) protein. In another embodiment, the TVM is a protein associated with the plasma membrane of the TVC, on the extracellular side. In another embodiment, the TVM is capable of shedding from the shed into a bodily fluid. In another embodiment, the TVM can be detected in a bodily fluid. In another embodiment, the bodily fluid is blood. In another embodiment, the bodily fluid is lymph. In another embodiment, the bodily fluid is saliva. In another embodiment, the bodily fluid is sperm. In another embodiment, the bodily fluid is cerebro-spinal fluid. In another embodiment, the bodily fluid is cervico-vaginal fluid. In another embodiment, the bodily fluid is any other bodily fluid known in the art. Each possibility represents a separate embodiment of the present invention.

[0312] In another embodiment, the TVM is IBSP (Integrin-binding sialoprotein). In another embodiment, the TVM is a nucleotide molecule encoding IBSP. In another embodiment, the TVM is CKLFSF6 (CKLF-like MARVEL transmembrane domain containing 6). In another embodiment, the TVM is a nucleotide molecule encoding CKLFSF6. In another embodiment, the TVM is HAPLN1 (Hyaluronan and proteoglycan link protein 1). In another embodiment, the TVM is a nucleotide molecule encoding HAPLN1. In another embodiment, the TVM is FLT1 (Fms-related tyrosine kinase 1 (vascular endothelial growth factor/vascular permeability factor receptor). In another embodiment, the TVM is a nucleotide molecule encoding FLT1. In another embodiment, the TVM is LGALS3BP (Lectin, galactoside-binding, soluble, 3 binding protein). In another embodiment, the TVM is a nucleotide molecule encoding LGALS3BP. In another embodiment, the TVM is CCL15 (chemokine (C-C motif) ligand 15). In another embodiment, the TVM is a nucleotide molecule encoding CCL15. In another embodiment, the TVM is PLA2G2D (Phospholipase A2, group IID). In another embodiment, the TVM is a nucleotide molecule encoding PLA2G2D. In another embodiment, the TVM is MUC3A (Mucin 3A, intestinal). In another embodiment, the TVM is a nucleotide molecule encoding MUC3A. In another embodiment, the TVM is LTBP2 (Latent transforming growth factor beta binding protein 2). In another embodiment, the TVM is a nucleotide molecule encoding LTBP2. In another embodiment, the TVM is CELSR2 (Cadherin, EGF LAG seven-pass G-type receptor 2). In another embodiment, the TVM is a nucleotide molecule encoding CELSR2. Each possibility represents a separate embodiment of the present invention.

[0313] In another embodiment, the TVM is another nucleotide molecule listed in FIG. 8. In another embodiment, the TVM is a protein encoded by a nucleotide molecule listed in FIG. 8. Each possibility represents a separate embodiment of the present invention.

[0314] In another embodiment, the TVM is a solute carrier (SLC) family protein. As provided herein, several SLC proteins (SLC9A5, SLC30A6, SLC11A1) were identified as TVM, showing that proteins belonging to this family are efficacious TVM.

[0315] In another embodiment, the TVM is a TMEM protein. In another embodiment, the TVM is a protein containing a TMEM region of homology. In another embodiment, the TVM is a protein containing a TMEM domain. As provided herein, several TMEM proteins (TMEM8, TMEM2, TMEM19) were identified as TVM, showing that proteins belonging to this family are efficacious TVM.

[0316] In another embodiment, the TVM is a KCN family protein. As provided herein, several KCN proteins (KCNE3, KCNE4) were identified as TVM, showing that proteins belonging to this family are efficacious TVM.

[0317] In another embodiment, the TVM is a CD74 protein. As provided herein, CD74 is a marker of tumor vasculature.

[0318] In another embodiment, the TVM is an SYCP1 (Synaptonemal complex protein 1).

[0319] In another embodiment, the TVM is a CTD (carboxy-terminal domain, RNA polymerase II, polypeptide A) small phosphatase 1.

[0320] Each of TVM disclosed herein, refers, in another embodiment, to a human TVM. In another embodiment, certain TVM are homologues of proteins known by a different name in another species, as indicated herein.

[0321] Each TVM, nucleic acid molecule, and protein represents a separate embodiment of the present invention.

[0322] In another embodiment, the TVM of the present invention exhibit the advantage over tumor cell markers that TVC are genetically stable, relative to tumor cells; thus, TVC are much less likely to switch their expression of the TVM, thus evading localization, detection and therapeutic methods of the present invention. In another embodiment, the TVM of the present invention exhibit the advantage that tumor vasculature is significantly different than physiologic vasculature (for example, as demonstrated herein in Example 3). In another embodiment, the TVM of the present invention exhibit the advantage over tumor cell markers that TVC are more accessible via the bloodstream, relative to tumor cells; thus, TVC are more accessible for localization, detection and anti-tumor therapy by methods of the present invention. In another embodiment, a ligand that binds a TVM of the present invention is administered to a subject via the bloodstream. In another embodiment, the TVM of the present invention exhibit the advantage over tumor cell markers that the TVM are expressed on early—as well as late stage tumors. Each possibility represents a separate embodiment of the present invention.

[0323] In another embodiment, the therapeutic methods of the present invention exhibit the advantage that they can target any tumors above 2-3 mm in size, as tumors require vascularization to grow beyond this size. In another embodiment, the diagnostic methods of the present invention exhibit the advantage that they can target any tumors above 2-3 mm in size, as tumors require vascularization to grow beyond this size; thus, these methods enable early detection of solid tumors. In another embodiment, the localization methods of the present invention exhibit the advantage that they can target any tumors above 2-3 mm in size, as tumors require vascularization to grow beyond this size; thus, these methods enable localization of small solid tumors. Each possibility represents a separate embodiment of the present invention.

[0324] In another embodiment, a nucleic acid molecule or peptide of the present invention is homologous to a nucleic acid molecule or peptide disclosed herein. The terms “homology,” “homologous,” etc, when in reference to any protein or peptide, refer, in one embodiment, to a percentage of amino acid residues in the candidate sequence that are identical with the residues of a corresponding native polypeptide, after aligning the sequences and introducing gaps, if necessary, to achieve the maximum percent homology, and not considering any conservative substitutions as part of the sequence identity. Methods and computer programs for the alignment are well known in the art.

[0325] Homology is, in another embodiment, determined by computer algorithm for sequence alignment, by methods well described in the art. For example, computer algorithm analysis of nucleic acid sequence homology may include the utilization of any number of software packages available, such as, for example, the BLAST, DOMAIN, BEAUTY (BLAST Enhanced Alignment Utility), GENPEPT and TREMBL packages.

[0326] In another embodiment, “homology” refers to identity to a sequence selected from SEQ ID No: 1-16, 18-23, 25-26, 28-32, 34-46, 48-58, 60-66, 68-70, and 85-211 of greater than 70%. In another embodiment, “homology” refers to identity to a sequence selected from SEQ ID No: 1-16, 18-23, 25-26, 28-32, 34-46, 48-58, 60-66, 68-70, and 85-211 of greater than 72%. In another embodiment, “homology” refers to identity to one of SEQ ID No: 1-16, 18-23, 25-26, 28-32, 34-46, 48-58, 60-66, 68-70, and 85-211 of greater than 75%. In another embodiment, “homology” refers to identity to a sequence selected from SEQ ID No: 1-16, 18-23, 25-26, 28-32, 34-46, 48-58, 60-66, 68-70, and 85-211 of greater than 78%. In another embodiment, “homology” refers to identity to one of SEQ ID No: 1-16, 18-23, 25-26, 28-32, 34-46, 48-58, 60-66, 68-70, and 85-211 of greater than 80%. In another embodiment, “homology” refers to identity to one of SEQ ID No: 1-16, 18-23, 25-26, 28-32, 34-46, 48-58, 60-66, 68-70, and 85-211 of greater than 82%. In another embodiment, “homology” refers to identity to a sequence selected from SEQ ID No: 1-16, 18-23, 25-26, 28-32, 34-46, 48-58, 60-66, 68-70, and 85-211 of greater than 83%. In another embodiment, “homology” refers to identity to one of SEQ ID No: 1-16, 18-23, 25-26, 28-32, 34-46, 48-58, 60-66, 68-70, and 85-211 greater than 85%. In another embodiment, “homology” refers to identity to one of SEQ ID No: 1-16, 18-23, 25-26, 28-32, 34-46, 48-58, 60-66, 68-70, and 85-211 of greater than 87%. In another embodiment, “homology” refers to identity to a sequence selected from SEQ ID No: 1-16, 18-23, 25-26, 28-32, 34-46, 48-58, 60-66, 68-70, and 85-211 of greater than 88%. In another embodiment, “homology” refers to identity to one of SEQ ID No: 1-20 of greater than 90%. In another embodiment, “homology” refers to identity to one of SEQ ID No: 1-16, 18-23, 25-26, 28-32, 34-46, 48-58, 60-66, 68-70, and 85-211 of greater than 92%. In another embodiment, “homology” refers to identity to a sequence selected from SEQ ID No: 1-16, 18-23, 25-26, 28-32, 34-46, 48-58, 60-66, 68-70, and 85-211 of greater than 93%. In another embodiment, “homology” refers to identity to one of SEQ ID No: 1-16, 18-23, 25-26, 28-32, 34-46, 48-58, 60-66, 68-70, and 85-211 of greater than 95%. In another embodiment, “homology” refers to identity to a sequence selected from SEQ ID No: 1-16, 18-23, 25-26, 28-32, 34-46, 48-58, 60-66, 68-70, and 85-211 of greater than 96%. In another embodiment, “homology” refers to identity to one of SEQ ID No: 1-16, 18-23, 25-26, 28-32, 34-46, 48-58, 60-66, 68-70, and 85-211 of greater than 97%. In another embodiment, “homology” refers to identity to one of SEQ ID No: 1-16, 18-23, 25-26, 28-32, 34-46, 48-58, 60-66, 68-70, and 85-211 of greater than 98%. In another embodiment, “homology” refers to identity to one of SEQ ID No: 1-16, 18-23, 25-26, 28-32, 34-46, 48-58, 60-66, 68-70, and 85-211 of greater than 99%. In another embodiment, “homology” refers to identity to one of SEQ ID No: 1-16, 18-23, 25-26, 28-32, 34-46, 48-58, 60-66, 68-70, and 85-211 of 100%. Each possibility represents a separate embodiment of the present invention.

[0327] In another embodiment, homology is determined via determination of candidate sequence hybridization, methods of which are well described in the art (See, for example, “Nucleic Acid Hybridization” Hames, B. D., and Higgins S. J., Eds. (1985); Sambrook et al., 2001, Molecular Cloning, A Laboratory Manual, Cold Spring Harbor Press, N.Y.; and Ausubel et al., 1989, Current Protocols in Molecular Biology, Green Publishing Associates and Wiley Interscience, N.Y). For example methods of hybridization may be carried out under moderate to stringent conditions, to the complement of a DNA encoding a native caspase peptide. Hybridization conditions being, for example, overnight incubation at 42° C. in a solution comprising: 10-20% formamide, 5×SSC (150 mM NaCl, 15 mM trisodium citrate), 50 mM sodium phosphate (pH 7.6), 5×Denhardt's solution, 10% dextran sulfate, and 20 μg/ml denatured, sheared salmon sperm DNA.

[0328] Protein and/or peptide homology for any amino acid sequence listed herein is determined, in another embodiment, by methods well described in the art, including immunoblot analysis, or via computer algorithm analysis of amino acid sequences, utilizing any of a number of software packages available, via established methods. Some of these packages may include the FASTA, BLAST, MPsrch or Scanps packages, and may employ the use of the Smith and Waterman algorithms, and/or global/local or BLOCKS alignments for analysis, for example. Each method of determining homology represents a separate embodiment of the present invention.

[0329] In another embodiment, the present invention provides a kit comprising a reagent utilized in performing a method of the present invention. In another embodiment, the present invention provides a kit comprising a composition, tool, or instrument of the present invention.

[0330] “Contacting,” in another embodiment, refers to directly contacting the target cell with a composition of the present invention. In another embodiment, “contacting” refers to indirectly contacting the target cell with a composition of the present invention. Each possibility represents a separate embodiment of the present invention. In another embodiment, the composition of the present invention is carried in the subjects' bloodstream to the target cell. In another embodiment, the composition is carried by diffusion to the target cell. In another embodiment, the composition is carried by active transport to the target cell. In another embodiment, the composition is administered to the subject in such a way that it directly contacts the target cell. Each possibility represents a separate embodiment of the present invention.

### Pharmaceutical Compositions and Methods of Administration

[0331] Pharmaceutical compositions containing compositions of the present invention can be, in another embodiment, administered to a subject by any method known to a person skilled in the art, such as parenterally, paracancerally, transmucosally, transdermally, intramuscularly, intravenously, intra-dermally, subcutaneously, intra-peritonealy, intra-ventricularly, intra-cranially, intra-vaginally or intra-tumorally.

[0332] In another embodiment of methods and compositions of the present invention, the pharmaceutical compositions are administered orally, and are thus formulated in a form suitable for oral administration, i.e. as a solid or a liquid preparation. Suitable solid oral formulations include tablets, capsules, pills, granules, pellets and the like. Suitable liquid oral formulations include solutions, suspensions, dispersions, emulsions, oils and the like. In another embodiment of the present invention, the active ingredient is formulated in a capsule. In accordance with this embodiment, the compositions of the present invention comprise, in addition to the active compound and the inert carrier or diluent, a hard gelating capsule.

[0333] In another embodiment, the pharmaceutical compositions are administered by intravenous, intra-arterial, or intra-muscular injection of a liquid preparation. Suitable liquid formulations include solutions, suspensions, dispersions, emulsions, oils and the like. In another embodiment, the pharmaceutical compositions are administered intravenously and are thus formulated in a form suitable for intravenous administration. In another embodiment, the pharmaceutical compositions are administered intra-arterially and are thus formulated in a form suitable for intra-arterial administration. In another embodiment, the pharmaceutical compositions are administered intra-muscularly and are thus formulated in a form suitable for intra-muscular administration.

[0334] In another embodiment, the pharmaceutical compositions are administered topically to body surfaces and are thus formulated in a form suitable for topical administration. Suitable topical formulations include gels, ointments, creams, lotions, drops and the like. In another embodiment, for topical administration, the compositions are prepared and applied as solutions, suspensions, or emulsions in a physiologically acceptable diluent with or without a pharmaceutical carrier.

[0335] In another embodiment, the active compound is delivered in a vesicle, e.g. a liposome.

[0336] In other embodiments, carriers or diluents used in methods of the present invention include, but are not limited to, a gum, a starch (e.g. corn starch, pregeletanized starch), a sugar (e.g., lactose, mannitol, sucrose, dextrose), a cellulosic material (e.g. microcrystalline cellulose), an acrylate (e.g. polymethylacrylate), calcium carbonate, magnesium oxide, talc, or mixtures thereof.

[0337] In other embodiments, pharmaceutically acceptable carriers for liquid formulations are aqueous or non-aqueous solutions, suspensions, emulsions or oils. Examples of non-aqueous solvents are propylene glycol, polyethylene glycol, and injectable organic esters such as ethyl oleate. Aqueous carriers include water, alcoholic/aqueous solutions, emulsions or suspensions, including saline and buffered media. Examples of oils are those of animal, vegetable, or synthetic origin, for example, peanut oil, soybean oil, olive oil, sunflower oil, fish-liver oil, another marine oil, or a lipid from milk or eggs.

[0338] In another embodiment, parenteral vehicles (for subcutaneous, intravenous, intraarterial, or intramuscular injection) include sodium chloride solution, Ringer's dextrose, dextrose and sodium chloride, lactated Ringer's and fixed oils. Intravenous vehicles include fluid and nutrient replenishers, electrolyte replenishers such as those based on Ringer's dextrose, and the like. Examples are sterile liquids such as water and oils, with or without the addition of a surfactant and other pharmaceutically acceptable adjuvants. In general, water, saline, aqueous dextrose and related sugar solutions, and glycols such as propylene glycols or polyethylene glycol are preferred liquid carriers, particularly for injectable solutions. Examples of oils are those of animal, vegetable, or synthetic origin, for example, peanut oil, soybean oil, olive oil, sunflower oil, fish-liver oil, another marine oil, or a lipid from milk or eggs.

[0339] In other embodiments, the compositions further comprises binders (e.g. acacia, cornstarch, gelatin, carbomer, ethyl cellulose, guar gum, hydroxypropyl cellulose, hydroxypropyl methyl cellulose, povidone), disintegrating agents (e.g. cornstarch, potato starch, alginic acid, silicon dioxide, croscarmelose sodium, crospovidone, guar gum, sodium starch glycolate), buffers (e.g., Tris-HCI., acetate, phosphate) of various pH and ionic strength, additives such as albumin or gelatin to prevent absorption to surfaces, detergents (e.g., Tween 20, Tween 80, Pluronic F68, bile acid salts), protease inhibitors, surfactants (e.g. sodium lauryl sulfate), permeation enhancers, solubilizing agents (e.g., glycerol, polyethylene glycerol), anti-oxidants (e.g., ascorbic acid, sodium metabisulfite, butylated hydroxyanisole), stabilizers (e.g. hydroxypropyl cellulose, hyroxypropylmethyl cellulose), viscosity increasing agents (e.g. carbomer, colloidal silicon dioxide, ethyl cellulose, guar gum), sweeteners (e.g. aspartame, citric acid), preservatives (e.g., Thimerosal, benzyl alcohol, parabens), lubricants (e.g. stearic acid, magnesium stearate, polyethylene glycol, sodium lauryl sulfate), flow-aids (e.g. colloidal silicon dioxide), plasticizers (e.g. diethyl phthalate, triethyl citrate), emulsifiers (e.g. carbomer, hydroxypropyl cellulose, sodium lauryl sulfate), polymer coatings (e.g., poloxamers or poloxamines), coating and film forming agents (e.g. ethyl cellulose, acrylates, polymethacrylates) and/or adjuvants. Each of the above excipients represents a separate embodiment of the present invention.

[0340] The compositions also include, in another embodiment, incorporation of the active material into or onto particulate preparations of polymeric compounds such as polylactic acid, polglycolic acid, hydrogels, etc, or onto liposomes, microemulsions, micelles, unilamellar or multilamellar vesicles, erythrocyte ghosts, or spheroplasts.) Such compositions influence, in another embodiment, the physical state, solubility, stability, rate of in vivo release, and rate of in vivo clearance.

[0341] The preparation of pharmaceutical compositions that contain an active component, for example by mixing, granulating, or tablet-forming processes, is well understood in the art. The active therapeutic ingredient is often mixed with excipients that are pharmaceutically acceptable and compatible with the active ingredient. For oral administration, the active agents are mixed with additives customary for this purpose, such as vehicles, stabilizers, or inert diluents, and converted by customary methods into suitable forms for administration, such as tablets, coated tablets, hard or soft gelatin capsules, aqueous, alcoholic or oily solutions. For parenteral administration, the active agents are converted into a solution, suspension, or emulsion, if desired with the substances customary and suitable for this purpose, for example, solubilizers or other substances.

[0342] Each of the above additives, excipients, formulations and methods of administration represents a separate embodiment of the present invention.

[0343] In one embodiment, the term “administering” refers to bringing a subject in contact with an active compound of the present invention. In another embodiment, administration is accomplished in vitro, i.e. in a test tube. In another embodiment, administration is accomplished in vivo, i.e. in cells or tissues of a living organism. Each possibility represents a separate embodiment of the present invention.

[0344] In one embodiment, the methods of the present invention comprise administering an active composition or compound of the present invention as the sole active ingredient. However, also encompassed within the scope of the present invention are methods for chemotherapy that comprise administering the active composition or compound in combination with one or more therapeutic agents (e.g. anti-tumor agents or cancer chemotherapy agents).

### EXPERIMENTAL DETAILS SECTION

### Example 1

### CD31-Based Immuno-LCM Successfully Captures Tumor Vascular Cells, Including Myeloid Cells

### Materials and Experimental Methods

### Tissues

[0345] Stage-III epithelial ovarian cancer and ductal breast cancer specimens were collected at the University of Turin, Italy, following informed consent, from previously untreated patients. Additional ovarian cancer specimens, and normal ovaries were collected at the University of Pennsylvania Medical Center after obtaining written informed consent under Institutional Review Board (IRB)-approved protocols. Malignant mesothelioma (n=3), non-small cell lung carcinoma (n=3) (provided by Dr. Steven M. Albelda) and malignant melanoma (n=3) (provided by Dr. David Elder) were collected after obtaining written informed consent under IRB-approved protocols. A panel of normal human tissues (FIG. 3B) was provided by the Cooperative Human Tissue Network. All specimens were processed in compliance with HIPAA requirements.

### Reagents

[0346] Antibody against human CD31 (BD Pharmingen) followed by secondary antibodies (Vector, Burlingame, Calif.) were diluted (1:10) in PBS containing RNA Protector (1:10, Roche, Basel, Switzerland). Streptavidin conjugate and AEC chromagen (Dako, Carpenteria, Calif.) were diluted in PBS containing RNA Protector. Laser Capture Microdissection (LCM) was performed using Microcut (MMI, Glattbrugg, Switzerland), employing less than three hours per slide.

### RNA Isolation

[0347] In order to increase RNA yield, dissected samples were treated with pre-digested proteinase-K. RNA was isolated using TRIzol reagent microprotocol (Gibco, Carlsbad, Calif.). Glycogen carrier (20 μg) was utilized to increase RNA yield in all protocols. RNA integrity and quantity were assayed using the Bioanalyzer (Agilent, Foster City, Calif.).

### RNA Amplification

[0348] RNA was amplified using Messageamp® (Ambion, Austin, Tex.), with the following modifications: First-strand synthesis was performed at 42° C. (2 hours), then 48° C. (10 min). After second-strand synthesis, RNA was transcribed at 37° C. (12 hours); T7-polymerase and RNAse inhibitor were added and transcription was continued for 12 more hours. After 2 rounds of amplification, cRNA was biotin-labeled (12-24 hours, ENZO RNA labeling kit, Farmingdale, N.Y.) and purified using RNA cleanup (Qiagen, Valencia, Calif.).

### Array Analysis

[0349] Biotin-labeled cRNA was fragmented and hybridized to U133 (HG-U133) Set arrays (Affymetrix, Santa Clara, Calif.) representing more than 39,000 transcripts were derived from approximately 33,000 well-substantiated human genes, and scanned.

qRT-PCR

[0350] qRT-PCR was performed using primers to the 3′ end of transcripts spanning intron-exon boundaries whenever possible (Table 3) for 35 cycles using Sybergreen® (ABI, Foster City, Calif.), with primers at 150 nM concentrations. Primers were 18-24 nucleotides and were designed to have a TM of 59-61° C. All transcripts were confirmed using 3% agarose gel electrophoresis. Gene expression was normalized against β-actin in all studies unless stated otherwise.

### Immunostaining

[0351] For validation studies, immunohistochemistry (IHC) was performed using the VECTASTAIN ABC kit (Vector, Burlingame, Calif.). All primary antibodies were incubated for one hour. Immuno-reaction was visualized with 3,3′-diaminobenzidine (Vector). All staining steps were performed at room temperature.

### In Situ Hybridization (ISH)

[0352] DIG-labeled antisense RNA probes were generated by PCR amplification of 500-600-bp products incorporating T7 promoters into the antisense primers, followed by in vitro transcription with DIG RNA labeling reagents and T7 RNA polymerase (Roche, Indianapolis, Ind.). For immunodetection, an HRP-rabbit anti-DIG antibody (GenPoint kit; DAKO) was used and biotinyl-tyramide was included to catalyze biotin deposition (Perkin Elmer, Boston, Mass.). A second round of amplification utilized anti-biotin-HRP linked antibody (DAKO) followed by biotinyl-tyramide. Biotin was detected using a streptavidin-Cy3 conjugate (Arcturus) at 1:200 for 5 minutes. Slides were then washed and mounted with fluorescent mounting media containing DAPI (Vector).

### Cells

[0353] Human PBMCs were obtained through leukapheresis from healthy donors and were cultured for 7 days in DC media supplemented with 800 IU/ml human GM-CSF and 400 IU of IL-4. Cells were collected on day 7, labeled with CFSE, and incubated in media enriched with recombinant human (rh)VEGF₁₆₅ (60 ng/ml, Peprotech, Rocky Hill, N.J.) with or without VEGF-A neutralizing antibody (R&D Systems, Minneapolis Minn.) for seven days. Human peripheral blood monocytes were collected through elutriation. This population is highly enriched (greater than 95%) for CD14⁺ monocytes. Cells were processed exactly as above, treating them with GM-CSF and IL-4 for 7 days and with rhVEGF-A with or without VEGF-A neutralizing antibody for 7 additional days.

[0354] Endothelial progenitor assays were performed using the Endocult® assay (Stem Cell Technologies, Vancouver, Canada).

[0355] Human CD45⁺ VE-cadherin⁺ vascular leukocytes and CD45⁻ VE-cadherin⁺ tumor endothelial cells were sorted from mechanically dispersed ovarian cancers by FACS performed with MoFlo Cell Sorter (Cytomation, Fort Collins, Colo.) using a FITC-labeled rabbit anti-human VE-cadherin antibody (Medsystems Diagnostics GmbH, Vienna, Austria) and APC-anti-CD45 (HI30; BD Pharmingen, San Diego, Calif.). PBS containing 10% normal murine serum (Sigma, St. Louis, Mo.) and 25 mg/ml anti-mouse Fc receptor (2.4G2 BD Pharmingen) was added prior to incubation to avoid nonspecific binding.

### Mice and Xenograft Tumors

[0356] NOD/LtSz-SCID/β2-microglobulin knockout (NOD/SCID/β2M^{-/-}) mice were bred and maintained under conditions approved by the Animal Care Committee of the University of Pennsylvania. These mice lack adaptive immunity and exhibit a severe defect in NK cell function, permitting superior engraftment of human leukocytes. Female mice were transplanted subcutaneously with 0.3 ml cold Matrigel® (BD Biosciences, Bedford, Mass.) containing 1×10⁶ 2008 cells alone or enriched with 1×10⁵ DC, VLC or TEC into bilateral axillae. Tumors were resected at 3 weeks, RNA was extracted by the TRIzol method and analyzed for tumor vascular markers by qRT-PCR.

### Flow Cytometry

[0357] DCs generated in vitro from PBMC or monocytes, and CFSE-labeled DC treated in vitro with VEGF-A were subjected to flow cytometry, using FACSCanto® flow cytometer and CellQuest 3.2.1fl software (both Becton Dickinson). These studies used biotin anti-VE-cadherin antibody (Medsystems Diagnostics GmbH, Vienna, Austria) coupled with streptavidin-PE-Cy7, APC anti human CD45 antibody and IgG control (BD Pharmingen).

### Bioinformatic and Statistical Analyses

[0358] Statistical significance for mRNA expression differences between tissue types was determined using a two-tailed Student's t-Test. Pearson's correlation was used to determine linearity of arrays performed with one versus two rounds of amplification or before and after immuno-LCM. Analyses of expression profiles were performed using Genespring software (Agilent); all samples were normalized with the median defined as 1.0. A heat map condition tree was developed using a hierarchical clustering algorithm (Genespring®) excluding all genes where the difference between the means of the tumor and normal vascular samples was less than its standard error. Descriptive statistics were performed with the SPSS® statistics software package (SPSS, IL, USA). The algorithm for the nonparametric method based on the ranks of the expression level for tumor and normal samples was developed in SAS 9.1.

### Optimization of Immunostaining

[0359] To procure highly purified tumor vasculature, a rapid and reliable immuno-LCM protocol was established for microarray applications. Different fixation conditions were tested, including −20° C. acetone; 70% ethanol:10% acetic acid (1:1, vol:vol); methanol; or 4% paraformaldehyde. Fixation with acetone or ethanol-based fixatives resulted in the greatest RNA yield (FIG. 2A). Acetic acid:ethanol fixation did not enable optimal IHC visualization of select target proteins. Acetone fixation was chosen for all further experiments.

[0360] Next, immunostaining was optimized. RNA isolated from tissue sections after standard IHC using LSAB (Dako) or Vectastain (Vector) showed near-complete degradation (FIG. 2B-6). We thus developed an ultra-fast IHC protocol with increased concentrations of reagents. High concentrations of RNAse inhibitor were added to all aqueous solutions. The choice of RNAse inhibitor was critical for RNA integrity. RNA Protector® (Roche) was found to be superior to placental RNAse inhibitor (Stratagene) or SuperRNAsin® (Ambion), leading to two-fold increase in RNA yield and integrity (FIG. 2B). Combining RNAse inhibitors reduced the efficacy of RNA Protector. Addition of RNA Protector to IHC allowed for 90% preservation of RNA integrity, based upon comparison of ribosomal RNA ratios determined using the Agilent Bioanalyzer.

[0361] Next detection systems were compared. AEC chromagen resulted in 40% greater RNA yield than DAB. Immunofluorescence resulted in 100% increased RNA yield compared to AEC (FIG. 1C), but contaminating cells were poorly identifiable without counterstaining, as assessed by qRT-PCR detection of the T-cell marker CD3-ε. Furthermore, fluorescence quenching limited LCM time. Thus, AEC IHC was used for subsequent experiments.

[0362] In addition, the effect of LCM time on RNA yield and integrity was examined. Leaving immunostained tissue sections at room temperature for up to three hours before RNA was isolated had no significant impact on the quality or quantity of RNA isolated (FIG. 1D).

### Optimization of RNA Purification.

[0363] RNA amplification methods (Arcturus Picopure kit, Stratagene microRNA isolation kit, Zymo mini RNA isolation kit and the modified TRIzol method for less than 10⁵ cells) were compared for RNA yield and quality after immuno-LCM. Arcturus Picopure gave the highest RNA yield for tissues stained with hematoxylin alone, but not following IHC (FIG. 2E). The protocol from ZYMO also resulted in low RNA yield. Conversely, the Stratagene micro RNA isolation kit and the modified TRIzol method gave significantly better and similar yields by quantification with the Agilent Bioanalyzer.

[0364] RNA quality was tested by qRT-PCR of GADPH and β-actin transcripts in total RNA procured from 1×10⁶ cells microdissected and processed as in Table 2. GADPH or β-actin transcripts were detected at similar levels in RNA isolated with the modified TRIzol method using phase-lock tubes (Eppendorf, Hamburg, Germany) or with the Stratagene micro RNA isolation kit. Arcturus picopure and ZYMO RNA isolation kits were 10-fold and 256-fold less sensitive, respectively (FIG. 2F).

[0365] The resulting protocol, requiring approximately 25 minutes for IHC, proved successful for numerous antibodies (Table 1). While some antibodies required longer incubation times (up to 15 minutes), there was no loss of RNA yield or integrity. Staining was quite specific, even with high concentrations of antibody. The protocol was reproducibly able to capture 500,000 μm² of tumor vascular cells in 3 hours of microdissection and recover ˜20 ng total RNA. RNA was reproducibly amplified to 15 μg of biotin-labeled cRNA.

### Optimization of RNA Amplification

[0366] The linearity of amplifications using Ambion MessageAmp was tested by comparing the gene expression profile of 10 μg unamplified whole tumor RNA to amplified 6, 24 or 60 ng of the same RNA. Transcriptional profiling was performed using Affymetrix U133 chips. Correlation between unamplified RNA and 24 or 60 ng input RNA was high (r²=0.93 and 0.94, respectively) (FIG. 2G). Correlation was lower with 6 ng input RNA (r²=0.87). High correlation was found between gene expression profiles from amplifications of input. RNA procured from the same tumor performed within the same experiment (intra-assay, r²=0.99) or in different experiments (inter-assay, r²=0.97). Immuno-LCM had no impact on expression profile (FIG. 1C).

TABLE 1
List of antibodies tested, company and clone used in the study
as indicated. Success with staining using the rapid IHC protocol
for LCM following fixation in acetone or acetic acid/ethanol
(AA/EtOH) is reported on the side for tested antibodies.

| Antibody | Company | Clone | Acetone | AA/EtOH |
|---|---|---|---|---|
| Biot hCD45 | BD Pharm | H130 | *** | −− |
| Biot hCD31 | Ancell | 158-2B3 | *** | ** |
| Biot hCD31 | Caltag | MBC 78.2 | ** | ** |
| hCD31 | Dako | JC70A | ** | ** |
| Biot CD146 | Chemicon | MAB16985B | *** | *** |
| CytoKeratin | Dako | AO575 | * | −− |
| Biot hCD3 | BD Pharm | UCHT1 | *** | −− |
| Fitc hCD31 | BD Pharm | WM59 | *** | *** |
| SMA-α-Cy3 | Sigma | 1A4 | ND | ND |
| FOLH1 | Zymed | ZMD.80 | ND | ND |
| STC2 | Genway | A22017 | ND | ND |
| Biot CD74 | BD Pharm | Mb741 | ND | ND |
| AML-1 | Active Motif | Polyclonal | ND | ND |
| hCD34-PE | BD Pharm | 581 | ND | ND |
| F-Spon | Abcam | Ab14271-50 | ND | ND |
| Lrp4 | Abcam | Ab13388-25 | ND | ND |
| Endothelial Lipase | Cayman | Polyclonal | ND | ND |
| | Chemical | | | |

(−−), poor stain,
(*) fair stain,
(**) good stain,
(***) excellent stain.
ND, not determined.

[0367] The optimized Immuno-LCM protocol is summarized in Table 2.

TABLE 2
Summary of Immuno-LCM Protocol

| | |
|---|---|
| Tumor | Freshly cut 8 μm sections of snap frozen tumor |
| IHC** | Fix in −20° C. Acetone - 4 min |
| | Incubate with primary Ab 1:10 - 5 min |
| | Incubate with 3x biotinylated anti-mouse Ab |
| | (Vector) - 5 min. |
| | Brief wash in PBS |
| | 2.5X Streptavidin-biotin amplification (DAKO) - |
| | 5 min |
| | Brief wash in PBS |
| | AEC (DAKO) stain - 3 to 5 min |
| | Brief wash in PBS |
| | Stain with dilute hematoxylin |
| | Rinse |
| | (** All steps with 1:10 RNAse Protector) |
| LCM | Dry tissue sections with hair dryer - 1 min |
| | Microdissect cells - up to 3 hours |
| RNA isolation | Treat with Proteinase K (10 μg/ml) - 8 min |
| | Extract RNA with TRIzol in phase lock gel - 1 hour |
| RNA Amplification | Use Ambion MessageAmp |

[0368] During the optimization of RNA isolation and amplification methodology, it was found that the immuno-LCM procedure had minimal impact on RNA integrity (FIG. 2A-F) or gene expression profiling (FIGS. 1C and 2G).

[0369] The PCR primers used for qRT-PCR and in situ hybridization are set forth in Table 3 below. A: qRT-PCR; B: T7 polymerase. (This table also includes primers used to amplify controls [those from CD3eps to GAPDH] and additional markers that do not appear in Table 5; selection of these additional markers is described below in Example 11).

TABLE 3A

| | | |
|---|---|---|
| GENE | FORWARD PRIMER; SEQ ID | REVERSE PRIMER; SEQ ID |

| | | |
|---|---|---|
| Adlican 5′ | cattgctagacacgtggaaaga; 212 | tctcattgccgtgaatcataag; 213 |
| Adlican 3′ | aggaaccctcaagctggact; 214 | cattggcaaacaccttgattc; 215 |
| C11ORF8 | cttcaaagagtgggctgtgtg; 216 | gaggcattgatgtacgttgtg; 217 |
| CD31 | tttggctagtccttgttctttgg; 218 | cggtgtcttcaggttggtattc; 219 |
| Coll11α1 | agggtgaagatggagatcctg; 220 | tttcaccttgtcttccctctg; 221 |
| Cytokeratin 18 | gcgtacagagatggagaacgaat; 222 | cgagactccagctctaccttgtt; 223 |
| EGFL6 | agaagaccacgagtgaggatg; 224 | ccacgttctgcttcaaaaatg; 225 |
| F2RL1 | tgctagcagcctctctctcc; 226 | tttccagtgacgtgggatg; 227 |
| FJX1 | actacctgacggccaacttc; 228 | cgcctcattgtccagaaag; 229 |
| FZ10 | cagactaaaacgctggactgc; 230 | tcttggaggtccaaatccac; 231 |
| GAPDH | cctgcaccaccaactgctta; 232 | catgagtccttccacgatacca; 233 |
| GPM6B | tcctatcacctgttcattgtgg; 234 | gcagcaatcttcccgactc; 235 |
| LZTS1 | agggagaagaccagcttcg; 236 | aggatctcgctagccttgg; 237 |
| OLFML2B | ccaaaggatgagcggatttac; 238 | gctgtacgggagcttgtagg; 239 |
| α-SMA | actgagcgtggctattccttc; 240 | agtggccatctcattttcaaag; 241 |
| SLIT2 | gaaatctcttgtcgaggggaaag; 242 | acacccacctctgcactctaatc; 243 |
| SPON-1 | agtgagcagctgaaggaagagt; 244 | catgtaacgttcctgaattccac; 245 |
| STC2 | tacctcaagcacgacctgtg; 246 | gtcagcagcaagttcacgag; 247 |
| TNFαIP6 | cgcaacttacaagcagctagag; 248 | taatgccagtttttccaaatcc; 249 |
| TNFRSF21 | ggcttcttcgtggatgagtc; 250 | ccgcaacactgtgtccttc; 251 |
| (DR6) | | |

TABLE 3B

| | | |
|---|---|---|
| Gene | FORWARD, ISH; SEQ ID | REVERSE, T7; SEQ ID |

| | | |
|---|---|---|
| Adlican | caagatcgaggccagtatatgtg; | gcaaacaccttgattctgctatc; |
| | 252 | 253 |
| CD31 | tgaggttctgagggtgaagg; | ggatcctaatacgactcactatagggagattgggatctga |
| | 254 | cattttctcg; 255 |
| EGFL6 | agaagaccacgagtgaggatg; | ggatcctaatacgactcactatagggagatgaggaggg |
| | 256 | gagataaactgac; 257 |
| FJX1 | actacctgacggccaacttc; | ggatcctaatacgactcactatagggagattcctcccggt |
| | 258 | gacactaag; 259 |
| FZ10 | cagactaaaacgctggactgc; | ggatcctaatacgactcactatagggagatcctttcagtgt |
| | 260 | atcacagcatc; 261 |
| GPM6B | tcctatcacctgttcattgtgg; | ggatcctaatacgactcactatagggagatgaaactggtt |
| | 262 | atcaggcaatc; 263 |
| TNFαIP6 | acggtctggcaaatacaagc; | ggatcctaatacgactcactatagggagaactgatgatgt |
| | 264 | catctggaagc; 265 |
| TNFRSF21 | ggcttcttcgtggatgagtc; | ggatcctaatacgactcactatagggagacacacacaca |
| | 266 | caccccaaac; 267 |

### Results

[0370] A rapid protocol was developed and optimized for immuno-LCM, followed by extraction and amplification of RNA for array analysis of tumor vascular cells (TVC). 4×10³ CD31⁺ cells with vascular morphology were isolated (FIG. 1A). RT-PCR analysis of RNA from purified TVC confirmed the absence of lineage-specific markers CD3-ε and CD5 (T-cells); CD16 (NK cells); CD19 and CD20 (B-cells); and cytokeratin-18 (tumor cells) (FIG. 1B). In addition, expression of the myeloid markers CD45, CD11c and CD14 was detected, confirming that TVC had been isolated. These findings were further confirmed by quantitative real-time polymerase chain reaction (qRT-PCR), which revealed a 15-fold enrichment of CD31 mRNA, similar expression of monocyte markers, and absence of cytokeratins and CD3-ε in micro-dissected TVC specimens relative to whole tumor. Smooth muscle α-actin was detectable in only 50% of samples and at 10-fold reduced levels relative to whole tumor, showing that few, in any perivascular cells were present.

[0371] Thus, the method successfully captured vascular cells, including vascular cells of monocytic lineage.

### Example 2

### mRNA Profile of Immuno-LCM Procured Tumor Vascular Cells

[0372] The mRNA profiles of micro-dissected TVC from 2 tumor samples were analyzed in parallel to 3 micro-dissected normal ovary vascular cells and to cultured human umbilical vein endothelial cells (HUVEC) using Affymetrix-U133 arrays. 13/13 known pan-endothelial markers in were detected in the TVC arrays. Similarly, 14/15 known tumor endothelial-specific markers (those listed below, Tem-4, and Tem-9) were exclusively expressed or markedly overexpressed (p<0.001) in TVC arrays (Table 4). These findings indicate that the protocol exhibits a sensitivity of greater than 90%.

TABLE 4
Expression of pan-endothelial and tumor endothelial markers in
HUVEC; endothelial cells from normal ovary isolated through
immuno-LCM (Normal); and tumor endothelial cells from ovarian
cancer specimens isolated through immuno-LCM (Tumor1 and
Tumor2).

| | HUVEC | Normal | Tumor 1 | Tumor 2 |
|---|---|---|---|---|
| Pan Endothelial Markers | | | | |
| Angiomodulin | + | + | + | + |
| Hevin | + | + | + | + |
| Connective tissue growth | + | + | + | + |
| factor | | | | |
| Collagen, type VI, alpha 1 | + | + | + | + |
| Interferon induced | + | + | + | + |
| transmembrane protein 1 | | | | |
| Guanine nucleotide binding | + | + | + | + |
| protein 11 | | | | |
| Von Willebrand factor | + | + | + | + |
| SmLIM | + | + | + | + |
| Collagen, type XVIII, | + | + | + | + |
| alpha 1 | | | | |
| Insulin-like growth | + | + | −− | + |
| factor-binding protein 4 | | | | |
| P1H12 (CD146) | +/− | +/− | +/− | +/− |
| Osteonectin | + | + | + | + |
| Matrix Gla protein | + | + | + | + |
| Tumor Endothelial Markers | | | | |
| TEM-1 | −− | + | + | + |
| TEM-3/TEM-7 | −− | + | + | + |
| TEM-5 | +/− | +/− | +/− | + |
| TEM-6 | + | + | + | + |
| TEM-8 | −− | −− | −− | −− |
| MMP-11 | −− | −− | +/− | + |
| Gelatinase A | +/− | +/− | + | + |
| Nidogen | + | −− | +/− | + |
| Collagen, type VI, alpha 3 | −− | + | + | + |
| Thy-1 cell surface antigen | −− | −− | + | + |
| Collagen, type III, alpha 1 | + | + | + | + |
| Bone morphogenetic | −− | −− | +/− | + |
| protein 1 | | | | |
| Cystatin S | + | −− | −− | −− |
| Macrophage mannose | +/− | +/− | +/− | +/− |
| receptor family | | | | |

(+) indicates detection of the gene with all associated probe sets, when more than one probe set exists;
(+/−): detection with one but not all probe sets associated with the gene;
(−−): lack of detection with any associated probe sets for the indicated gene.

[0373] Next, vascular cells from 21 stage-III ovarian tumors and 4 normal ovaries were microdissected, profiled and analyzed. In order to determine if there was a distinct signature that could distinguish tumor from normal vasculature, unsupervised hierarchical clustering was performed using 17,920 genes (after elimination of all genes wherein the difference between tumor and normal means was less than the standard error of the difference in the means). Hierarchical clustering of these samples accurately classified tumor from normal vascular cells, demonstrating a clear difference in the molecular profile between tumor and normal vasculature and further confirming the validity and accuracy of the method used (FIG. 1D).

[0374] To identify robust, tumor vasculature-specific genes, the 17,920 genes were further characterized using (1) the fold difference comparing tumor to normal vascular samples; (2) the number of tumor and normal vascular samples where a gene was classified as “present” or “absent” by MAS5.0 Suite (Affymetrix); and (3) the gene-specific ranks of the normalized gene expression values for all samples. 70 genes were selected as tumor vascular markers (TVM) that fulfilled at least 1 of the following 3 criteria: (1) present in more than 15/21 TVC samples and absent in more than 3/4 normal vascular samples; (2) present in more than 18/21 tumor vascular samples and at least 3-fold up-regulated on average in tumor vascular samples; or (3) at least 3/4 normal samples had 1 of the 5 lowest ranked expression values (therefore at least 20/21 tumor vascular samples had higher expression values relative to normal samples) (Table 5). By this method, a number of transcripts previously not known to be TVM were identified, e.g. adlican, GPM6B, TNFaIP6, LZTS1 and numerous expressed sequence tags (EST). The identified markers also included several known TVM (FolH1 (PSMA), Thy-1, TEM-7, SLIT2, and chondroitin-sulfate proteoglycan-2 (versican)), further validating the methods used to identify TVM.

TABLE 5

| | Fold | | | |
|---|---|---|---|---|
| | Change | | | |
| Common Gene | Tumor | No. Present in | | Rank of |
| Name or | vs. | Tumor | Normal | Normal |
| Genebank No. | Normal | [21) | (4] | Specimens |

part 1. List of 70 TVM identified by three independent analyses.
Genes were included in the list if they fulfilled tumor vascular
marker criteria in at least one of the analyses. The table describes
results from all analyses for each gene. First column lists genes
reported by common gene name and ESTs reported by Genebank
admission; second column describes expression fold change in
tumor relative to normal vascular cells; third column describes the
number of tumor (total of 21) and normal (total of four) vascular cell
specimens for which the gene was determined to be expressed;
fourth column describes the expression rank of the four normal
vascular cell samples (with 1 being the lowest
expression and 25 the highest).

| | | | | |
|---|---|---|---|---|
| ADAM12 | 5.1 | 13 | 0 | 1, 2, 4, 6 |
| Adlican | 5.4 | 19 | 2 | 1, 2, 5, 8 |
| AI798118 | 7.7 | 15 | 0 | 1, 2, 3, 5 |
| AK000168 | 3.0 | 17 | 1 | 4, 6, 7, 15 |
| AMI-1 | 30 | 12 | 0 | 1, 2, 3, 5 |
| ANKRD9 | 3.2 | 16 | 1 | 1, 4, 7, 16 |
| Av758342 | 4.0 | 17 | 2 | 1, 2, 9, 10 |
| AW242409 | 4.9 | 17 | 2 | 1, 3, 5, 9 |
| Aw510657 | 3.9 | 18 | 4 | 4, 5, 6, 7 |
| AW517716 | 7.4 | 12 | 0 | 1, 2, 3, 13 |
| BDKRB2 | 3.7 | 15 | 1 | 2, 3, 5, 11 |
| C6orf37 | 5.2 | 15 | 1 | 2, 3, 5, 7 |
| C6orf55 | 2.4 | 18 | 1 | 1, 2, 3, 8 |
| C6orf69 | 2.0 | 19 | 3 | 1, 2, 4, 7 |
| C7orf32 | 3.4 | 16 | 1 | 1, 2, 4, 7 |
| C11orf8 | 4.08 | 13 | 1 | 1, 2, 5, 17 |
| CD24 | 3.7 | 16 | 1 | 2, 6, 7, 8 |
| CD51 | 3.7 | 15 | 2 | 1, 2, 3, 8 |
| CENTA2 | 2.1 | 16 | 3 | 1, 3, 4, 5 |
| CLDN1 | 2.4 | 16 | 1 | 1, 2, 3, 13 |
| COL11A1 | 10.1 | 15 | 0 | 1, 2, 7, 8 |
| COL15A1 | 4.8 | 21 | 4 | 1, 3, 8, 12 |
| COL22A1 | 3.5 | 11 | 0 | 1, 2, 3, 5 |
| CSPG2 | 5.8 | 21 | 4 | 1, 2, 3, 6 |
| DEFB1 | 2.4 | 11 | 0 | 1, 2, 4, 13 |
| DSG2 | 4.2 | 11 | 1 | 2, 3, 15, 17 |
| EGFI6 | 4.6 | 19 | 4 | 1, 2, 6, 7 |
| EIF2AK4 | 2.8 | 18 | 1 | 1, 2, 4, 9 |
| EBP41L3 | 4.0 | 16 | 2 | 1, 4, 5, 13 |
| ESM1 | 3.7 | 20 | 1 | 1, 4, 5, 7 |
| FBXO32 | 2.2 | 16 | 1 | 1, 2, 5, 8 |
| FJX1 | 11.3 | 16 | 0 | 1, 2, 3, 5 |
| FOLH1 | 8.8 | 13 | 1 | 1, 2, 4, 6 |
| FLJ22875 | 2.3 | 16 | 0 | 2, 3, 6, 7 |
| FLJ46072 | 3.3 | 20 | 1 | 1, 2, 3, 5 |
| Fz2RL1 | 3.6 | 13 | 0 | 1, 7, 10, 12 |
| FZ010 | 2.0 | 15 | 0 | 2, 3, 6, 10 |
| GPM68 | 14.63 | 16 | 0 | 1, 2, 5, 6 |

part 2.

| | | | | |
|---|---|---|---|---|
| GPR105 | 3.3 | 11 | 0 | 1, 2, 6, 10 |
| HOXB7 | 2.8 | 16 | 1 | 1, 2, 7, 14 |
| IGSF4 | 5.0 | 18 | 1 | 1, 4, 5, 6 |
| IVNS1ABP | 3.3 | 21 | 4 | 1, 2, 3, 5 |
| KCNK5 | 2.5 | 16 | 1 | 1, 3, 5, 9 |
| LZTS1 | 4.3 | 19 | 1 | 1, 2, 6, 7 |
| MCM4 | 2.4 | 13 | 0 | 1, 2, 4, 6 |
| NID2 | 4.1 | 16 | 1 | 1, 4, 8, 15 |
| OlfML28 | 2.4 | 18 | 1 | 1, 2, 4, 11 |
| O88PL3 | 4.1 | 17 | 1 | 1, 3, 4, 20 |
| PCDH17 | 2.9 | 21 | 4 | 1, 3, 4, 7 |
| PLCE1 | 3.8 | 13 | 1 | 1, 3, 4, 16 |
| PLXDC1 | 4.0 | 21 | 3 | 1, 3, 5, 8 |
| PRDM1 | 2.4 | 15 | 0 | 1, 3, 4, 5 |
| RGC32 | 9.0 | 16 | 2 | 1, 3, 6, 8 |
| RGS1 | 8.0 | 12 | 1 | 2, 3, 5, 16 |
| RRM2 | 4.7 | 16 | 1 | 2, 4, 5, 21 |
| SCNN1A | 15.8 | 16 | 0 | 1, 2, 3, 6 |
| SCD2 | 4.42 | 20 | 2 | 1, 2, 6, 10 |
| SlamF6 (BLAME) | 3.5 | 13 | 0 | 2, 3, 6, 8 |
| SLIT2 | 2.0 | 16 | 1 | 3, 4, 6, 9 |
| SPON1 | 2.5 | 16 | 1 | 1, 6, 7, 17 |
| SPRY4 | 2.8 | 20 | 2 | 1, 2, 3, 5 |
| STC2 | 9.0 | 11 | 0 | 1, 2, 4, 5 |
| STCH | 4.0 | 15 | 2 | 1, 6, 7, 9 |
| TACSTD1 | 11.6 | 16 | 2 | 1, 2, 7, 10 |
| TARS | 2.8 | 16 | 1 | 2, 5, 9, 11 |
| TBX2 | 2.2 | 14 | 1 | 1, 5, 6, 24 |
| THY1 | 3.1 | 19 | 3 | 1, 2, 4, 8 |
| TNFAIP8 | 5.6 | 17 | 0 | 1, 2, 3, 6 |
| TNFSFR21 (DRS) | 8.2 | 11 | 0 | 1, 3, 4, 7 |
| UPP1 | 4.97 | 15 | 1 | 1, 3, 5, 20 |

TABLE 6

Sequences of the TVM and/or exemplary GenBank Accession No(s). Any GenBank
Accession No. that appears in this table or in any table or part of this specification
is merely exemplary, and is not intended to limit the sequence of the present invention
to a particular isoform, a particular species, or any other type of limitation. Each
GenBank Accession No. represents a separate embodiment of the present invention. Further,
sequences presented herein as cDNA sequences (i.e. containing “t,” signifying thymidine)
will be understood to also represent the corresponding RNA sequence (i.e. containing “u”
for uridine). Further, some of the sequences presented herein contain non-coding sequences
5′ and/or 3′ to the coding sequence of the mRNA. In these cases, the isolated coding
sequence of the mRNA and methods comprising same represent another embodiment of the
present invention.

| | | |
|---|---|---|
| Gene name | | |
| and/or | | |
| Exemplary | | |
| GenBank | SEQ ID | Sequence and/or exemplary GenBank Accession |
| Accession No(s) | No. | Numbers |

| | | |
|---|---|---|
| meltrin-L | 1 | AF023476 |
| precursor | | NM_003474 |
| (ADAM12) | | |
| Adlican | 2 | AF245505; Sequence below. |

atgcccaagcgcgcgcactggggggccctctccgtggtgctgatcctgctttggggccatccgcgagtggcgctggcctgcccgcatccttgt
gcctgctacgtccccagcgaggtccactgcacgttccgatccctggcttccgtgcccgctggcattgctagacacgtggaaagaatcaatttgg
ggtttaatagcatacaggccctgtcagaaacctcatttgcaggactgaccaagttggagctacttatgattcacggcaatgagatcccaagcatc
cccgatggagctttaagagacctcagctctcttcaggttttcaagttcagctacaacaagctgagagtgatcacaggacagaccctccagggtct
ctctaacttaatgaggctgcacattgaccacaacaagatcgagtttatccaccctcaagctttcaacggcttaacgtctctgaggctactccatttg
gaaggaaatctcctccaccagctgcaccccagcaccttctccacgttcacatttttggattatttcagactctccaccataaggcacctctacttag
cagagaacatggttagaactcttcctgccagcatgcttcggaacatgccgcttctggagaatctttacttgcagggaaatccgtggacctgcgat
tgtgagatgagatggtttttggaatgggatgcaaaatccagaggaattctgaagtgtaaaaaggacaaagcttatgaaggcggtcagttgtgtgc
aatgtgcttcagtccaaagaagttgtacaaacatgagatacacaagctgaaggacatgacttgtctgaagccttcaatagagtcccctctgagac
agaacaggagcaggagtattgaggaggagcaagaacaggaagaggatggtggcagccagctcatcctggagaaattccaactgccccagt
ggagcatctctttgaatatgaccgacgagcacgggaacatggtgaacttggtctgtgacatcaagaaaccaatggatgtgtacaagattcacttg
aaccaaacggatcctccagatattgacataaatgcaacagttgccttggactttgagtgtccaatgacccgagaaaactatgaaaagctatggaa
attgatagcatactacagtgaagttcccgtgaagctacacagagagctcatgctcagcaaagaccccagagtcagctaccagtacaggcagg
atgctgatgaggaagctctttactacacaggtgtgagagcccagattcttgcagaaccagaatgggtcatgcagccatccatagatatccagct
gaaccgacgtcagagtacggccaagaaggtgctactttcctactacacccagtattctcaaacaatatccaccaaagatacaaggcaggctcg
gggcagaagctgggtaatgattgagcctagtggagctgtgcaaagagatcagactgtcctggaagggggtccatgccagttgagctgcaacg
tgaaagcttctgagagtccatctatcttctgggtgcttccagatggctccatcctgaaagcgcccatggatgacccagacagcaagttctccattc
tcagcagtggctggctgaggatcaagtccatggagccatctgactcaggcttgtaccagtgcattgctcaagtgagggatgaaatggaccgca
tggtatatagggtacttgtgcagtctccctccactcagccagccgagaaagacacagtgacaattggcaagaacccaggggagtcggtgacat
tgccttgcaatgctttagcaatacccgaagcccaccttagctggattcttccaaacagaaggataattaatgatttggctaacacatcacatgtata
catgttgccaaatggaactctttccatcccaaaggtccaagtcagtgatagtggttactacagatgtgtggctgtcaaccagcaaggggcagac
cattttacggtgggaatcacagtgaccaagaaagggtctggcttgccatccaaaagaggcagacgcccaggtgcaaaggctctttccagagtc
agagaagacatcgtggaggatgaagggggctcgggcatgggagatgaagagaacacttcaaggagacttctgcatccaaaggaccaagag
gtgttcctcaaaacaaaggatgatgccatcaatggagacaagaaagccaagaaagggagaagaaagctgaaactctggaagcattcggaaa
aagaaccagagaccaatgttgcagaaggtcgcagagtgtttgaatctagacgaaggataaacatggcaaacaaacagattaatccggagcgc
tgggctgatattttagccaaagtccgtgggaaaaatctccctaagggcacagaagtacccccgttgattaaaaccacaagtcctccatccttgag
cctagaagtcacaccaccttttcctgctgtttctcccccctcagcatctcctgtgcagacagtaaccagtgctgaagaatcctcagcagatgtacct
ctacttggtgaagaagagcacgttttgggtaccatttcctcagccagcatggggctagaacacaaccacaatggagttattcttgttgaacctgaa
gtaacaagcacacctctggaggaagttgttgatgacctttctgagaagactgaggagataacttccactgaaggagacctgaaggggacagca
gcccctacacttatatctgagccttatgaaccatctcctactctgcacacattagacacagtctatgaaaagcccacccatgaagagacggcaac
agagggttggtctgcagcagatgttggatcgtcaccagagcccacatccagtgagtatgagcctccattggatgctgtctccttggctgagtctg
agcccatgcaatactttgacccagatttggagactaagtcacaaccagatgaggataagatgaaagaagacacctttgcacaccttactccaac
ccccaccatctgggttaatgactccagtacatcacagttatttgaggattctactataggggaaccaggtgtcccaggccaatcacatctacaag
gactgacagacaacatccaccttgtgaaaagtagtctaagcactcaagacaccttactgattaaaaagggtatgaaagagatgtctcagacact
acagggaggaaatatgctagagggagaccccacacactccagaagttctgagagtgagggccaagagagcaaatccatcactttgcctgact
ccacactgggtataatgagcagtatgtctccagttaagaagcctgcggaaaccacagttggtaccctcctagacaaagacaccacaacagtaa
caacaacaccaaggcaaaaagttgctccgtcatccaccatgagcactcacccttctcgaaggagacccaacgggagaaggagattacgccc
caacaaattccgccaccggcacaagcaaaccccacccacaacttttgccccatcagagactttttctactcaaccaactcaagcacctgacatta
agatttcaagtcaagtggagagttctctggttcctacagcttgggtggataacacagttaatacccccaaacagttggaaatggagaagaatgca
gaacccacatccaagggaacaccacggagaaaacacgggaagaggccaaacaaacatcgatataccccttctacagtgagctcaagagcg
tccggatccaagcccagcccttctccagaaaataaacatagaaacattgttactcccagttcagaaactatacttttgcctagaactgtttctctgaa
aactgagggcccttatgattccttagattacatgacaaccaccagaaaaatatattcatcttaccctaaagtccaagagacacttccagtcacatat
aaacccacatcagatggaaaagaaattaaggatgatgttgccacaaatgttgacaaacataaaagtgacattttagtcactggtgaatcaattact
aatgccataccaacttctcgctccttggtctccactatgggagaatttaaggaagaatcctctcctgtaggctttccaggaactccaacctggaatc
cctcaaggacggcccagcctgggaggctacagacagacatacctgttaccacttctggggaaaatcttacagaccctccccttcttaaagagct
tgaggatgtggatttcacttccgagtttttgtcctctttgacagtctccacaccatttcaccaggaagaagctggttcttccacaactctctcaagcat
aaaagtggaggtggcttcaagtcaggcagaaaccaccacccttgatcaagatcatcttgaaaccactgtggctattctcctttctgaaactagac
cacagaatcacacccctactgctgcccggatgaaggagccagcatcctcgtccccatccacaattctcatgtctttgggacaaaccaccaccac
taagccagcacttcccagtccaagaatatctcaagcatctagagattccaaggaaaatgttttcttgaattatgtggggaatccagaaacagaag
caaccccagtcaacaatgaaggaacacagcatatgtcagggccaaatgaattatcaacaccctcttccgaccgggatgcatttaacttgtctaca
aagctggaattggaaaagcaagtatttggtagtaggagtctaccacgtggcccagatagccaacgccaggatggaagagttcatgcttctcatc
aactaaccagagtccctgccaaacccatcctaccaacagcaacagtgaggctacctgaaatgtccacacaaagcgcttccagatactttgtaac
ttcccagtcacctcgtcactggaccaacaaaccggaaataactacatatccttctggggctttgccagagaacaaacagtttacaactccaagatt
atcaagtacaacaattcctctcccattgcacatgtccaaacccagcattcctagtaagtttactgaccgaagaactgaccaattcaatggttactcc
aaagtgtttggaaataacaacatccctgaggcaagaaacccagttggaaagcctcccagtccaagaattcctcattattccaatggaagactccc
tttctttaccaacaagactctttcttttccacagttgggagtcacccggagaccccagatacccacttctcctgccccagtaatgagagagagaaa
agttattccaggttcctacaacaggatacattcccatagcaccttccatctggactttggccctccggcacctccgttgttgcacactccgcagac
cacgggatcaccctcaactaacttacagaatatccctatggtctcttccacccagagttctatctcctttataacatcttctgtccagtcctcaggaa
gcttccaccagagcagctcaaagttctttgcaggaggacctcctgcatccaaattctggtctcttggggaaaagccccaaatcctcaccaagtcc
ccacagactgtgtccgtcaccgctgagacagacactgtgttcccctgtgaggcaacaggaaaaccaaagcctttcgttacttggacaaaggttt
ccacaggagctcttatgactccgaataccaggatacaacggtttgaggttctcaagaacggtaccttagtgatacggaaggttcaagtacaagat
cgaggccagtatatgtgcaccgccagcaacctgcacggcctggacaggatggtggtcttgctttcggtcaccgtgcagcaacctcaaatccta
gcctcccactaccaggacgtcactgtctacctgggagacaccattgcaatggagtgtctggccaaagggaccccagccccccaaatttcctgg
atcttccctgacaggagggtgtggcaaactgtgtcccccgtggagagccgcatcaccctgcacgaaaaccggaccctttccatcaaggaggc
gtccttctcagacagaggcgtctataagtgcgtggccagcaatgcagccggggcggacagcctggccatccgcctgcacgtggcggcactg
ccccccgttatccaccaggagaagctggagaacatctcgctgcccccggggctcagcattcacattcactgcactgccaaggctgcgcccct
gcccagcgtgcgctgggtgctcggggacggtacccagatccgcccctcgcagttcctccacgggaacttgtttgttttccccaacgggacgct
ctacatccgcaacctcgcgcccaaggacagcgggcgctatgagtgcgtggccgccaacctggtaggctccgcgcgcaggacggtgcagct
gaacgtgcagcgtgcagcagccaacgcgcgcatcacgggcacctccccgcggaggacggacgtcaggtacggaggaaccctcaagctg
gactgcagcgcctcgggggacccctggccgcgcatcctctggaggctgccgtccaagaggatgatcgacgcgctcttcagttttgatagcag
aatcaaggtgtttgccaatgggaccctggtggtgaaatcagtgacggacaaagatgccggagattacctgtgcgtagctcgaaataaggttggt
gatgactacgtggtgctcaaagtggatgtggtgatgaaaccggccaagattgaacacaaggaggagaacgaccacaaagtcttctacgggg
gtgacctgaaagtggactgtgtggccaccgggcttcccaatcccgagatctcctggagcctcccagacgggagtctggtgaactccttcatgc
agtcggatgacagcggtggacgcaccaagcgctatgtcgtcttcaacaatgggacactctactttaacgaagtggggatgagggaggaagga
gactacacctgctttgctgaaaatcaggtcgggaaggacgagatgagagtcagagtcaaggtggtgacagcgcccgccaccatccggaaca
agacttacttggcggttcaggtgccctatggagacgtggtcactgtagcctgtgaggccaaaggagaacccatgcccaaggtgacttggttgtc
cccaaccaacaaggtgatccccacctcctctgagaagtatcagatataccaagatggcactctccttattcagaaagcccagcgttctgacagc
ggcaactacacctgcctggtcaggaacagcgcgggagaggataggaagacggtgtggattcacgtcaacgtccagccacccaagatcaac
ggtaaccccaaccccatcaccaccgtgcgggagatagcagccgggggcagtcggaaactgattgactgcaaagctgaaggcatccccacc
ccgagggtgttatgggcttttcccgagggtgtggttctgccagctccatactatggaaaccggatcactgtccatggcaacggttccctggacat
caggagtttgaggaagagcgactccgtccagctggtatgcatggcacgcaacgagggaggggaggcgaggttgatcgtgcagctcactgtc
ctggagcccatggagaaacccatcttccacgacccgatcagcgagaagatcacggccatggcgggccacaccatcagcctcaactgctctg
ccgcggggaccccgacacccagcctggtgtgggtccttcccaatggcaccgatctgcagagtggacagcagctgcagcgcttctaccacaa
ggctgacggcatgctacacattagcggtctctcctcggtggacgctggggcctaccgctgcgtggcccgcaatgccgctggccacacggag
aggctggtctccctgaaggtgggactgaagccagaagcaaacaagcagtatcataacctggtcagcatcatcaatggtgagaccctgaagct
cccctgcacccctcccggggctgggcagggacgtttctcctggacgctccccaatggcatgcatctggagggcccccaaaccctgggacgc
gtttctcttctggacaatggcaccctcacggttcgtgaggcctcggtgtttgacaggggtacctatgtatgcaggatggagacggagtacggcc
cttcggtcaccagcatccccgtgattgtgatcgcctatcctccccggatcaccagcgagcccaccccggtcatctacacccggcccgggaaca
ccgtgaaactgaactgcatggctatggggattcccaaagctgacatcacgtgggagttaccggataagtcgcatctgaaggcaggggttcag
gctcgtctgtatggaaacagatttcttcacccccagggatcactgaccatccagcatgccacacagagagatgccggcttctacaagtgcatgg
caaaaaacattctcggcagtgactccaaaacaacttacatccacgtcttctgaaatgtggattccagaatgattgcttaggaactgacaacaaag
cggggtttgtaagggaagccaggttggggaataggagctcttaaataatgtgtcacagtgcatggtggcctctggtgggtttcaagttgaggttg
atcttgatctacaattgttgggaaaaggaagcaatgcagacacgagaaggagggctcagccttgctgagacactttcttttgtgtttacatcatgc
caggggcttcattcagggtgtctgtgctctgactgcaatttttcttcttttgcaaatgccactcgactgccttcataagcgtccataggatatctgagg
aacattcatcaaaaataagccatagacatgaacaacacctcactaccccattgaagacgcatcacctagttaacctgctgcagtttttacatgata
gactttgttccagattgacaagtcatctttcagttatttcctctgtcacttcaaaactccagcttgcccaataaggatttagaaccagagtgactgata
tatatatatatattttaattcagagttacatacatacagctaccattttatatgaaaaaagaaaaacatttcttcctggaactcacttttatataatgtttta
tatatatattttttcctttcaaatcagacgatgagactagaaggagaaatactttctgtcttattaaaattaataaattattggtctttacaagacttggat
acattacagcagacatggaaatataattttaaaaaatttctctccaacctccttcaaattcagtcaccactgttatattaccttctccaggaaccctcc
agtggggaaggctgcgatattagatttccttgtatgcaaagtttttgttgaaagctgtgctcagaggaggtgagaggagaggaaggagaaaact
gcatcataactttacagaattgaatctagagtcttccccgaaaagcccagaaacttctctgcagtatctggcttgtccatctggtctaaggtggctg
cttcttccccagccatgagtcagtttgtgcccatgaataatacacgacctgttatttccatgactgctttactgtatttttaaggtcaatatactgtacat
ttgataataaaataatattctcccaaaaaaaaaa

| | | |
|---|---|---|
| AI798118 | 3 | tttcaaatgttgccaaagtcatgggaactctagttaggaagatttcccctacttaga |
| | | gcatgtcactctggcgtggaccttcattcatctctttccccggcctggggttgatcc |
| | | attctcccttcttcccccttctcctgccctgcccccaccttctcagtcacaatctttgt |
| | | cttcccagtttggcaggacatcccaggggcccctgggctttccttcctgaggtta |
| | | gaagatggtgctttgaaagaacaattgctcctaccacccatcaaatcaaactttta |
| | | gaagctgataaaaaccttaaaaatcattcaatctcctcttctttctccttctgtagatg |
| | | aggaatctgagggtctaagaggagacatgagctgctgagattgactgagctag |
| | | gcagggccagacatagactccacgggcaggcccgcagtctttccaccaggtc |
| | | aggccactccctcgcccagggctcaagattccttttagagttcaacagagcagct |
| | | cccgagaacagaccagccctcaagactcaaatttcag |
| AK000168 | 4 | Sequence below. |

gttttctcatttgcaaccacccatgctggcatgaaagaaagtgaagctgctgggttgaactccatcttctgggggacatttgcagcctgcagggg
cctggcaatcttttttgctacctgtttacagcctggaaccatgattgtgttgagcaacattggcagcctgacttcatctttatttctggtgctttttgaca
agaacccaatttgtctctggatagcaacttcagtgtatggggcttcaatggcaaccacatttccgagtggtgtttcttggattgagcagtacacgac
catccatgggaaatctgcagcattttttgtaattggtgcttccctgggagaaatggctattcctgcagtcattggaattcttcaaggaaaataccctg
atttgcctgtagttctgtatacctctttgggagcatcaatagctactggtattttatttcctgtgctatataaattagccacttcacctcttgatcgccagc
gaaaagaagacagaaagagtgaggaccagaaagctctgctctctagctccgggctaaatgaatatgaggaagagaatgaagaggaggatg
cagaaaaatggaatgaaatggattttgaaatgattgaaacgaatgatacaatgaggcattctataatagagacatctagaagtagtctgacggag
cccacagctgaagtctataatcaatacccatcaaatgcactggtgtttgagtcttctccttttaatactggcagtgcccatgtgaagcacttgccag
aaaccaggacaaaagggactaacgtttagagaagatggattactcactgacatctttgaataactgccacttctaaggacgccattcagagcag
agcattagcagaatttcaccatgctttggggattaaaatttttaggtccatattatagcaaatgctaaaaatttttgaaatgttctgtaattcccagagt
cttccataaataaccaaatggtctcatacacgtacaataggatcttgttataacgctatcatttgacatgtgactgattaggaaatattttatggtctcc
acccctcagagcacccaaagaaggcattgttttitgagaaggggggtattctcagaatgagaccatgtaggagttgaattgattggttgaacaaat
tatcaggtatcaatatttttccaggaaagttgaggagaatagtttcataaaagagaaatgggccgggattacaggcttgagcccccgcgcccag
ccatcaaaatgctttttatttctgcatatgttgaatactttttacaatttaaaaaaatgatctgttttgaaggcaaaattgcaaatcttgaaattaagaagg
caaaaatgtaaaggagtcaaaactataaatcaagtatttgggaagtgaagactggaagctaatttgcattaaattcacaaacttttatactctttctgt
atatacattttttttctttaaaaaacaactatggatcagaatagccacatttagaacactttttgttatcagtcaatatttttagatagttagaacctggtcc
taagcctaaaagtgggcttgattctgcagtaaatcttttacaactgcctcgacacacataaacctttttaaaaatagacactccccgaagtcttttgtt
cgcatggtcacacactgatgcttagatgttccagtaatctaatatggccacagtagtcttgatgaccaaagtcctttttttccatctttagaaaactac
atgggaacaaacagatcgaacagttttgaagctactgtgtgtgtgaatgaacactcttgctttattccagaatgctgtacatctattttggattgtatat
tgtgtttgtgtatttacgctttgattcatagtaacttcttatggaattgatttgcattgaacacaaactgtaaataaaaagaaatggctgaaagaaaaaa
aaaaaaaaaaaaaaaaaaaaaaaaaa

| | | |
|---|---|---|
| acute myeloid | 5 | NM_001001890 |
| leukemia 1 | | NM_001754 |
| (AML-1) | | |
| (TEL/AML1; or | | |
| ETV6/RUNX1) | | |
| ankyrin repeat | 6 | BC015422 |
| domain 9 | | BC027479 |
| (ANKRD9) | | NM_152326 |
| AV758342 | 7 | atttganccccttnccttgaanccccatcgtatcgggacgcgcgccattgtgttggta |
| | | cccgggaattcggccattatggccgggagaaacgagatgggggtgaagctggag |
| | | atatttcggatgataatctacctcactttccctgtggctatgttctgggtttccaatcagg |
| | | ccgagtggtttgaggacgatgtcatacagcgcaagagggagctgtggccacctga |
| | | gaagcttcaagagatagaggaattcaaagagaggttacggaagcggcgggagga |
| | | gaagctccttcgcgacgcccagcagaactcctgaggcctccaagtgggagtccta |
| | | gcccctcccctgatgaaatatacatatactcagttccttgttaagaaaaaaaaannaa |
| | | aaaaaaaaaaaaaaaaacatgtcggccgcctcggcccagtcgactctagactcga |
| | | gcaagcttatgcatgcggccgcaattcgagctcacttggccaattcgccctatagtg |
| | | agtcgtatcacaattcactggcccgcgttttacaacgtcgtgacttggaaaaactcttg |
| | | ccgttacccaacctaaattgcctttgaacaaaaatcccctttgcgcaagttggctaata |
| | | tccaagagagcccgaaccaatcggcctttccaacagttgcccagcttgatgccaat |
| | | gaaattgtgagccttaaattttggttaaattcgggtaaatttttggttaatcagctcaatt |
| | | ttaacccaaaggccatggcccttt |
| AW242409 | 8 | atttcaaacaaatccaaaacttatttttgtttatagaaacaagacaacacacagtaaaa |
| | | tgaggaaatacaatagttttttcaatatagtaccacaagccattttttctgtaaaggacc |
| | | aaatattagatactatcacaaaacattttatcactcattcaaaacaagaatcattcagtt |
| | | gccccaggaaaaaacacactgaaattattttagatagcataataagctagaggatat |
| | | agaacatttgaaaaacagttccaaaaaatggaatactaaagatgcaacattaattctt |
| | | agtacatttgttatggtaatgaattaaagcattatagaatatattcaagtcagaaatcct |
| | | gtagtatgaagacataccttcatatgtgaaaatattattttatattaataataattattctg |
| | | gtatttatatcagatttatcatcagattttctttcctgaatttattaataatttgaccatggaa |
| | | cacaaaaatatttcattcattttataatactttg |
| AW510657 | 9 | tttgatatcattaaagtttattcaagaattgtttgacagacaacccttttaggtaagga |
| | | aaaaagtaactactgaagaacaaagaaagttccaagagggaattaactctagttc |
| | | tacaaattcaggactatacagtgacgattaggagctgagttcatgccttttagaact |
| | | aattacaattgttcgtaagtacgagtttaacataaatctacagctcttttctagagtac |
| | | aatagtaactaaaatagctggttttacatgacaggaaacacaatgtcctttgtaaca |
| | | ggtaaatactaaaaaagtacaattttttcctttttttccctcatataaatacataatgta |
| | | gggggataaataatacaaaaaagaaaatattttaacaggctataaccaataaatat |
| | | atatgaaaatgttcactagaacacacgcttttttgagcaatgctggacttctgcagg |
| | | cccagacatctctcacagttgtttttacatccattaaaatgtaaattctaagtgcaac |
| | | aaaagtgtcctgtcag |
| AW517716 | 10 | ttacgttttatttttatttatttactttttttagagatggagtctcactctgttgccaggctgg |
| | | agtgcagcggtgtgatcttggctcactgcaacttccgccccctgggttcaagtgatt |
| | | tcctgcctcagccttccaagtagctgggattacaggcatgcaccaccacacctggc |
| | | aatttttgtatctttagtagagacggggtttcaccatgttggccaggatggtcttgatct |
| | | cttgacctggtgatctgcctgcctcagcctcccaaagtgctgggatacaggtgtgag |
| | | ccaccgtgcctggcctatgtatttttttttttaaacacacacataaatctaaagcaaagg |
| | | gtatgccaagattcagctggggccaggtctgacccccactctgagcatctcattagc |
| | | ttcccatcagtggaatacaatggagacatattccacttggtctggcaatgtcctcc |
| B2-bradykinin | 11 | X86163; Sequence below. |
| receptor | | |
| (BDKRB2) | | |

cagattcacaaactgcaggactgggcagggagcagacagtgagcaaacgccagcagggctgctgtgaatttgtgtaaggattgagggacag
ttgcttttcagcatgggcccaggaatgccaaggagacatctatgcacgaccttgggaaatgagttgatgtctccggtaaaacaccggagactaa
ttcctgccctgcccaattttgcagggagcatggctgtgaggatggggtgaactcacgcacagccaaggactccaaaatcacaacagcattact
gttcttatttgctgccacacctgagccagcctgctccttcccaggagtggaggaggcctggggggagggagaggagtgactgagcttccctcc
cgtgtgttctccgtccctgccccagcaagacaacttagatctccaggagaactgccatccagctttggtgcaatggctgagtgcacaagtgagtt
gttgccctgggtttctttaatctattcagctagaactttgaaggacaatttcttgcattaataaaggttaagccctgaggggtccctgataacaacct
ggagaccaggattttatggctcccctcactgatggacaaggaggtctgtgccaaagaagaatccaataagcacatattgagcacttgctgtatat
gcagtattgagcactgtaggcaagacccaagaaagagaaggagccatctccatcttgaaggaactcaaagactcaagtgggaacgactggg
cactgccaccaccagaaagctgttcgacgagacggtcgagcagggtgctgtgggtgatatggacagcagaagggggagaccaaggttcca
gctcaaccaataactattgcacaaccacctgtccctgcctcagttcccttttatgtaacatgaagtcgttgtgagggttaaaggcagtaacaggtat
aaagtacttagaaaagcaaagggtgctacgtacatgtgaggcatcattacgcagacgtaactgggatatgtttactataaggaaaagacactga
ggtctagaaatagctccgtggagcagaatcagtattgggagccggtggcggtgtgaagcaccagtgtctggcacacagtaggtgctcattgg
ctcccttccacctgtcattcccaccaccctgaggccccaaccgccacacacacaggagcatttggagagaaggccatgtcttcaaagtctgattt
gtgatgaggcagaggaagatatttctaatcggtcttgcccagaggatcacagtgctgagaccccccaccaccagccggtacctgggaagggg
gagagtgcaggcctgctcagggactgttcctgtctcagcaaccaagggattgttcctgtcaatcaatggtttattggaaggtggcccagtatgag
ccctagaagagtgtgaaaaggaatggcaatggtgttcaccatcggcagtgccagggcagcactcattcacttgataaatgaatatttattagctg
gttggagagctagaacctggagagctagaacctggagaactagaacctggagggctagaacctggagaggctagaaccaagaagggctag
aacctggaggggctagaacctagagaagctaaaacctgagctagaagctggaggactagaacctggagggctggaatctgaagggctaga
acctggagggctggaatctggagagctagaacctggagggctagaacctggagggctagaacctagaagggctagaacctggagggctg
gaatctggagagctagaacctggagggctagaacctggagggctagaacctagaagggctagaacctggagggctagaacctggcaggtt
agaacctagaagggctagaacctggagagccagaacctggagggctagaacctggaagggctagaacctgtagagctagaacatggaga
gctagaacccggcaggctagaacctggcaagctagaacctggagggaatgaacctggagggctagaacctggagaatgagaaaaatttaca
tggcaaagagcccataaatcctgaccaatccaactctgaattttaaagcaaaagcgtgaaaaaaaagattccctccttacccccaacccactcttt
tttcccaccacccactctcctctgcctcagtaagtatctggaggaagaaaacaggtgaaagaagaagtaaaaaccatttagtattagtattagaat
gaagtcaaactgtgccacacatggtgaatgaaaaaaaaaaaaaagaggctgtgttttgtcacacagggcagtcattcagcaccagagcacgtg
atggtctgagactctcttaggagcagagctctgccgcaatggccatgtggggatccacacctggtctgaggggcaactgagtctgcgggaga
agagcggccctatgcatggtgtagatgccctgataaagaacatctgtcctgtgaaagactcaatgagctgttatgttgtaaacaggaagcatttc
acatccaaacgagaaaatcatgtaaacatgtgtcttttctgtagagcataataaatggatgaggtttttgcaaaaaaaaaaaaaaaaa

| | | |
|---|---|---|
| C6orf37 | 12 | AF350451; Sequence below |

attttccccgcacaactgctaaagctccagagacacgagcgtgtgtggcagcaagagccgccagttcgggaccaccgcagctggggtggca
gcggcgcaggaggggtcgcggggagggagtggtgagcgcaggcggcaggggtctgggaaagacgaagtcgctatttgctgtctgagcg
cgctcgcagctcctggaagtgttgccgcctctcggtttgtctcgcctgctgcgctcctagaagggcggccgcctccaggactgaccagggcca
agtggcgctcggcgggcactacatggcggagggtgaagggtacttcgccatgtctgaggacgagctggcctgcagcccctacatcccccta
ggcggcgacttcggcggcggcgacttcggcggcggcgacttcggcggcggcggcacgttcggtgggcattgcttggactattgcgaaagc
cctacggcgcactgcaatgtgctgaactgggagcaagtgcagcggctggacggcatcctgagcgagaccattccgattcacgggcgcggca
acttccccacgctcgagctgcagccgagcctgatcgtgaaggtggtgcggcggcgcctggccgagaagcgcattggcgtccgcgacgtgc
gcctcaacggctcggcagccagccatgtcctgcaccaggacagcggcctgggctacaaggacctggacctcatcttctcggccgacctgcg
cggggaaggggagtttcagactgtgaaggacgtcgtgctggactgcctgttggacttcttacccgagggggtgaacaaagagaagatcacac
cactcacgctcaaggaagcttatgtgcagaaaatggttaaagtgtgcaatgactctgaccgatggagtcttatatccctgtcaaacaacagtggc
aaaaatgtggaactgaaatttgtggattccctccggaggcagtttgaattcagtgtagattcttttcaaatcaaattagactctcttctgctcttttatga
atgttcagagaacccaatgactgagacatttcaccccacaataatcggggagagcgtctatggcgatttccaggaagcctttgatcacctttgtaa
caagatcattgccaccaggaacccagaggaaatccgagggggaggcctgcttaagtactgcaacctcttggtgaggggctttaggcccgcct
ctgatgaaatcaagacccttcaaaggtatatgtgttccaggtttttcatcgacttctcagacattggagagcagcagagaaaactggagtcctattt
gcagaaccactttgtgggattggaagaccgcaagtatgagtatctcatgacccttcatggagtggtaaatgagagcacagtgtgcctgatggga
catgaaagaagacagactttaaaccttatcaccatgctggctatccgggtgttagctgaccaaaatgtcattcctaatgtggctaatgtcacttgct
attaccagccagccccctatgtagcagatgccaactttagcaattactacattgcacaggttcagccagtattcacgtgccagcaacagacctac
tccacttggctaccctgcaattaagaatcatttaaaaatgtcctgtggggaagccatttcagacaagacaggagagaaaaaaaaaaaaaagaaa
aaaaaaagagtgatccagcccttattagggatgtgttttgtgcaatgatgatatgctcctggttttaagtttggcaaagcttatgtatcttttaatagat
gtgggagcatgatctcgaaaggatccttttcccttctcttattctcctacccaattggattctatcctgcaaaaaaagagagacctgtcattagaagc
aaccaggttctcctgatacaagagaagaaatgtgtgatgacaatatgggtttgctgtatctgctcccatagctttgccataggaaaaaaaaaagtg
gaaagtttcttttaagatggaattcataaaagggaaaatacggaggaaaaaaggtctcactccaacttgtgaatcagtttaggagttcagatattaa
tagtaacaatacaggaaaaaggggaactccaacgttgggattactgtctgaggcttgtagcaagtgctttctgtggaatgatcttgttttgctaaca
aacggcttgctccaaatgaacagtagtaggttggtgcagttctcgtaacaatcagcagaacttatgatgacacaatccattaattccagctgcgtg
catagatcacatttttaaaatgtaaaaatgcaagcaaaaacagctgtaacaaagaaagtgtgctcaaggaccaaagatttaacagataaaaatac
ccaattagaagagatatagtagactatatgaagagagattatatttgttacacaccaatatacatcaaagtgcctgttgccttctgaaaatttgaagt
ggcaaaattattttatggtttaatgattattttattttatcagggactgcctcaagaagaaaataacataagcttgtgaatggtggagaaaatgcccta
ttttttcttgcaaatacttgtataaagttaacatttgttgatctgatattatcataggtacatgtgtatgtgtgtataaattatatgtgtgtgtgtatatata
cattttatatatacattttatatgtatatatacacagtagattgactatgatctagaataatgtctcaaataggaaatgtttaaatactgtgtgtttttatgt
tttcaacaggataacatgagacgtgggcatattgcaatgatgaattaaatccacatctaaaaaaattaaatgaaggagggaaccaagtaatatatttcat
aggaagagcagaaattatactgttttagtgggatttttttttctttttttttttttctttggtgagccataaaattccacaaatgggagaatatttgtttggc
agagcactcttttttatattgaactgccattttgacagttggaacccatttattaaaaaaaaaattgcattcctctatgatgtttaatctagtggatcatgg
atcagtaataggctacttaaatccctgactgctaaaaaggatttccggtgatctaaacactacttgctaatgtttaaatgaattttaatgaatgcattct
gcatttctggaccactagaatttagtaatgtgaaatgaccctttttacagaatatttgcacaattgcttaaaatttatatatgagatatatattatatataa
cattttataaatcatgtcaatatgaaacatctttgatctggttgtcacactgcatttaaatatttagtactgtactttaaatcgctttccattaaatcaaatc
caactttattttctttcttacaaaaataccagttatacctttgtgaaatgaactggcattactatttcagttcaataacagctaatcctaaaaccacccttt
ctcctagccagtagttcctctagatactggtctctgaaaatgcatttgttaaaaacaaaacaaaactaacacataagaaccttccctttgtgttgtga
aacaaccacataatctccacaaccttagtggatgactgcttgctatgataattcctcgaagacccaattagaagattttcatcatcagttaaagaga
gaccacgggagaaaaaaatatcctcctgttggcagtataatttgtttgtttgtttatctagggatcctcagatgcttagtgctaggttaatccaggtta
atccgtctggactaccttttgtgcatctttctttgaagccttaatgggaacctgatgggtttgctgtagcagcttccttgtgaattctgtcagagctgca
acagccgctgcactgccactcagttttctaaggaactcctcctactaccatcttggctcagtctccctcacttaagccctgggtttgaaaaattaatt
gcaacttcccaggaaacattgttcagtttgcagattaagcctggcactcacctatcagaaaccagagctccgcctgcttagttgtttcaaagttttct
gaaagaaaactaggggagcacttgtgaacacaggagcagctggtgatctgctttcttaccctaactcttgacaaatgagtcgtctactattttaaa
gagtctggaggtctctgactctgccataacaataacctgctgttaatttataacacagatttttgtttggaagagccttatttgaaatacactttgattta
ttttcttaaatatttatattcttttcttgcttacttcagggttggtagcttagttggaagtgccagcacctggcacctattcatatagaacaggctgtactc
aagacaacttctagcatttactttaagacttatataatttatttctattttgtgtgtactatagtcttgtgcatatgtagttgaacacacagtgaaatatatg
tctctctttgtggatgtgcggcctaaaaatttgaatgtctggtgagagagagccatgtgtataggtcagagaaaagaacagctcccgactccctat
tagcgcctgtgatttgtttccttttgtgtttatctggcctagtgtgctgtttctttaaaccaggaagaagttttgtcttttggaggctcttctcacctgtcca
gcctggcatgtcagagaacacatagcctgtgacaatgccgtttttaaaggtttacttaatttgcagtaaatccagctgcctcaagaactcctacacc
aagatggacatttcctttccagaaatgggatcaagtatctgctcactttggtattggatggactaataatgtagctccaaaaatgcaaggatggaa
gaatatgtgtaatccaaaccaaggaaggaaatgaaaagtgaacgtactgtttttaccacccctttctgtttgcttattgttggttgcttcactgtgcat
aaagtgttttcaatgcaacgcttgttaaataaatattgtgaactattttgtaaatgaaatgtattatgttgaaagctgtcagttcaaaaataagctttttt
gttgttgttgaagatgaagtgtgttaggtgaaaccaaaaagccaaaaaaagtaatttcatatatagcatctatttgaatataatctttctttaaaatttct
tttagcatagcattttcagtgctaagaaagaatctctatgttatattttgttaaaataatggctttctaacaaagcaaatggtaaagtacaaagttggaa
gatgtcaagttaacgagacttgctgcaaagccttgcagaacggaggaggctcgcctgctggctgtctctccctccaacctctctacaatcatgcc
tgctttgaggtgttctgttgcagcaagctgcaccttgggtcactcttttggaatattttgactataggctgcgtcacaggcagaaaaggagttgatg
gaaaatggactaaaaaactgacatgtttgaatcagtgctagagggaacagattgtgaattttgtttacagcatccaatatttggatttttttgtaaata
aaaaagttatttttttctattg

| | | |
|---|---|---|
| C6orf55 | 13 | BC022536 |
| | | NM_016485 |
| | | AF271994 |
| C6orf69 | 14 | BC023525 |
| | | BC035879 |
| C7orf32 | 15 | BC015899, AF452639, NM_145230, AK057700, |
| | | AK094602, AK098362, AK172725, BX640846 |
| C11orf8 | 16 | NM_001584, U57911 |
| CD24 antigen | 17 | BC064619, AK026603, BC007674 NM_013230, |
| | | AK125531, D87667, L33930 |
| CDP- | 18 | NM_001263 |
| diacylglycerol | | U60808 |
| synthase | | U65887 |
| (CDS1) | | |
| centaurin, | 19 | NM_018404 |
| alpha 2 | | AJ272195 |
| (CENTA2) | | |
| claudin 1 | 20 | NM_021101, AF086514, AF101051 |
| (CLDN1) | | |
| collagen, type | 21 | NM_001854 |
| XI, alpha 1 | | NM_080629 |
| (COL11A1) | | NM_080630 |
| | | AB208844 |
| collagen, type | 22 | NM_001855; Sequence below |
| XV, alpha 1 | | |
| (COL15A1) | | |

ttctgcccgccgccgccgctgccgagcgccgcctttgttccctgcaggaagggcgagcgcgcgggccagcgctcagccagcgcctcacga
cccttcgtcctccgctaagctccaacgctctgctcgactagccgcgcgccttccggggctccgcagacccgcgagatggcaccaaggagga
acaacgggcagtgctggtgtctgctgatgctgctctcggtctccacgcccctccctgctgtcacccagacccgcggtgcgacagagactgctt
cccagggtcacctggacctcacgcagctcatcggtgtcccgctgccctcgtccgtatcctttgtcacaggctatggtggcttcccggcctacagt
ttcgggcctggtgccaatgttggccgcccagccaggactctcatcccatccaccttcttcagggacttcgccatcagggtcgtggtgaagccca
gcagcacccgtggtggcgtgctcttcgccatcactgacgccttccagaaggtcatctacctgggcctgcggctctcaggtgtggaggacggc
caccagcggatcatcctctactacacggagccaggctcccatgtgtcccaagaagctgctgccttctcggtgcctgtgatgacccacaggtgg
aaccgcttcgccatgattgtccagggtgaggaagtgaccctcctcgtgaactgtgaggagcacagccgcatccccttccagcggtcctcccag
gctttggcttttgagtccagcgctggaatcttcatgggcaatgcaggagctacagggctcgagagattcactggctccctccagcagctcaccg
tgcaccccgaccccaggactcccgaggagctgtgtgaccctgaagagtcctcggcatctggagagaccagtgggctgcaggaggcagacg
gagtagctgagatcttagaagccgtcacctacactcaagcctcgcccaaagaagcaaaagttgaacccataaacacacctccaactccatcct
ccccctttgaagacatggaactttctggtgaacctgtacccgaggggaccctggaaaccaccaacatgagcatcatccagcacagcagcccc
aaacaagggtctggtgagatcctgaatgacacactggagggggttcattctgtggatggtgaccccattactgacagcggctcaggggctgg
ggccttccttgacattgctgaagaaaagaatttagcagcaacagcagcggggctggccgaggtgcccatcagcactgctggagaagcagag
gccagcagtgtgcccaccgggggaccaaccctctctatgtccacggagaacccagaggaaggggtcactccaggtccagataatgaagag
cgtttacgagcaacagcagcaggggaggccgaggcactcgccagcatgcctggggaagtggaggccagtggtgtggcccccggggagct
ggacctctccatgtccgcccagagcctcggggaagaggccactgtgggtccaagcagtgaagacagtttaacaacagctgcagctgcaacc
gaagtgtccctcagtacttttgaggatgaggaagccagtggggtccccacagatggcctggctcccctcacagccaccatggcccctgagcg
ggcagtcacttctggtcctggtgatgaagaagacttggcagcagccacaacagaggagcccctcatcacagctgggggtgaagagtccggc
agccctccccctgatgggccaccgctgcccctgcccacagtggctcctgaaagatggatcactccagctcaaagagaacatgtgggaatgaa
aggacaggctgggcccaaaggagaaaagggtgatgctggggaggagcttcctggccctcctgaaccttctgggcctgttggacccacggca
ggagcagaagcagagggctctggcctaggctggggctcggacgtcggctctggctctggtgacctggtgggcagtgagcagctgctgaga
ggtcctccaggacccccagggccacctggcttacctgggattccaggaaaaccaggaactgatgttttcatgggaccccctggatctcctgga
gaggatggacctgctggtgaacctgggcccccgggccctgagggacagcctggagttgatggagccaccggccttcccgggatgaaagg
ggagaagggagcaagagggcctaatggctcagttggtgaaaagggtgaccctggcaacagaggcttacctggacccccggggaaaaagg
gacaagctggccctcctggggtcatgggacccccagggcctcctggaccccctgggcccccaggccctggatgcacaatgggacttggatt
cgaggataccgaaggctctggaagcacccagctattgaatgaacccaaactctccagaccaacggctgcaattggtctcaaaggagagaaag
gagaccggggacccaagggagaaagggggatggatggagccagtattgtgggaccccctgggccgagagggccacctgggcacatcaa
ggtcttgtctaattccttgatcaatatcacccatggattcatgaatttctcggacattcctgagctggtggggcctccggggccggacgggttgcct
gggctgccaggatttccaggtcctagaggaccaaaaggtgacactggtttacctggctttccaggactaaaaggagaacagggcgagaagg
gagagccgggtgccatcctgacagaggacattcctctggaaaggctgatggggaaaaagggtgaacctggaatgcatggagccccaggac
caatggggcccaaaggaccaccaggacataaaggagaatttggccttcccgggcgacctggtcgcccaggactgaatggcctcaagggtac
caaaggagatccaggggtcattatgcagggcccacctggcttacctggccctccaggcccccctgggccacctggagctgtgattaacatca
aaggagccattttcccaatacccgtccgaccacactgcaaaatgccagttgatactgctcatcctgggagtccagagctcatcacttttcacggt
gttaaaggagagaaaggatcctggggtcttcctggctcaaagggagaaaaaggcgaccagggagcccagggaccaccaggtcctccactt
gatctagcttacctgagacactttctgaacaacttgaagggggagaatggagacaaggggttcaaaggtgaaaaaggagaaaaaggagacat
taatggcagcttccttatgtctgggcctccaggcctgcccggaaatccaggcccggctggccaaaaaggggagacagtcgttgggccccaag
gacccccaggtgctcctggtctgcctgggccacctggctttggaagacctggtgatcctgggccaccggggcccccggggccaccaggacc
tccagctatcctgggagcagctgtggcccttccaggtccccctggccctccaggacagccagggcttcccggatccagaaacctggtcacag
cattcagcaacatggatgacatgctgcagaaagcgcatttggttatagaaggaacattcatctacctgagggacagcactgagtttttcattcgtg
ttagagatggctggaaaaaattacagctgggagaactgatccccattcctgccgacagccctccaccccctgcgctttccagcaacccacatca
gcttctgcctccaccaaaccctatttcaagtgccaattatgagaagcctgctctgcatttggctgctctgaacatgccattttctggggacattcga
gctgattttcagtgcttcaagcaggccagagctgcaggactgttgtccacctaccgagcattcttatcttcccatttgcaagatctgtccaccattgt
gaggaaagcagagagatacagccttcccatagtgaacctcaagggccaagtactttttaataattgggactcaattttttctggccacggaggtc
agttcaatatgcatattccaatatactcctttgatggtcgagacataatgacagatccttcttggccccagaaagtcatttggcatggctccagccc
ccatggcgtccgccttgtggataactactgtgaagcatggcgaaccgcggacacagcggtcacgggacttgcctccccgctgagcacgggg
aagattctggaccagaaagcatacagctgtgctaatcggctaattgtcctatgtatcgaaaacagtttcatgacagacgctaggaagtaatggcc
ttctgatgattcttaaagagttttcaattttttcttatgtgaagagttgacactgaaatctaaaatgtttaattgttgtaaatattacagttttttttttttt
actacatattctttacaacagcaaccaaagaaaacatacctcaatacactcaaaactgaagacatagaggactcagatcaaagacaaaatctgatccat
atattggtgctagattctgcaggaaaccccagcagtgtgaacgcatcccaacataggttaagagcaagttgaaaacaaaggccagattctgcca
ctgcatccttcagacagttatatcctccttttaaaccattgttgttgagtgtaagatgtccttcatgttttcttataaagtcagtgtttagaaatgttaccct
ttctaagttatatacagatcaaatgcttttttctttcacgtacatccatcatttgcaactgctgttcgtacacagaaacaggactgctcaaatgatcctat
ttgtattttctgatgctatcagactctaatgtttttttccctaaaatattattgccatcatgctttaggaatttttatatttttacacaatcatattttagta
tggtgtctgtttatgtaactctgacttgctggaaaagttgaaactccaaataatctgaaactagaaaagaaatagcacataattactaccttccccttggcg
gctctcctcccccaacccccaccccacaattttatgacttccatttggcaattgttgaattataactgcgactgaaacaaacaggttcatagagatg
aattttctgagaaacatatatctacatgttgtataattggattttttttccatgtaagtgaacataaaaacatcttttccggg

| | | |
|---|---|---|
| collagen, type | 23 | NM_152888 |
| XXII, alpha 1 | | AF406780 |
| (COL22A1) | | BC042075 |
| chondroitin | 24 | NM_004385; Sequence below |
| sulfate | | |
| proteoglycan 2 | | |
| (CSPG2) | | |

gctgccccgagcctttctggggaagaactccaggcgtgcggacgcaacagccgagaacattaggtgttgtggacaggagctgggaccaag
atcttcggccagccccgcatcctcccgcatcttccagcaccgtcccgcaccctccgcatccttccccgggccaccacgcttcctatgtgacccg
cctgggcaacgccgaacccagtcgcgcagcgctgcagtgaattttccccccaaactgcaataagccgccttccaaggccaagatgttcataaa
tataaagagcatcttatggatgtgttcaaccttaatagtaacccatgcgctacataaagtcaaagtgggaaaaagcccaccggtgaggggctcc
ctctctggaaaagtcagcctaccttgtcatttttcaacgatgcctactttgccacccagttacaacaccagtgaatttctccgcatcaaatggtctaa
gattgaagtggacaaaaatggaaaagatttgaaagagactactgtccttgtggcccaaaatggaaatatcaagattggtcaggactacaaaggg
agagtgtctgtgcccacacatcccgaggctgtgggcgatgcctccctcactgtggtcaagctgctggcaagtgatgcgggtctttaccgctgtg
acgtcatgtacgggattgaagacacacaagacacggtgtcactgactgtggatggggttgtgtttcactacagggcggcaaccagcaggtaca
cactgaattttgaggctgctcagaaggcttgtttggacgttggggcagtcatagcaactccagagcagctctttgctgcctatgaagatggatttg
agcagtgtgacgcaggctggctggctgatcagactgtcagatatcccatccgggctcccagagtaggctgttatggagataagatgggaaag
gcaggagtcaggacttatggattccgttctccccaggaaacttacgatgtgtattgttatgtggatcatctggatggtgatgtgttccacctcactgt
ccccagtaaattcaccttcgaggaggctgcaaaagagtgtgaaaaccaggatgccaggctggcaacagtgggggaactccaggcggcatg
gaggaacggctttgaccagtgcgattacgggtggctgtcggatgccagcgtgcgccaccctgtgactgtggccagggcccagtgtggaggt
ggtctacttggggtgagaaccctgtatcgttttgagaaccagacaggcttccctccccctgatagcagatttgatgcctactgctttaaacctaaa
gaggctacaaccatcgatttgagtatcctcgcagaaactgcatcacccagtttatccaaagaaccacaaatggtttctgatagaactacaccaatc
atccctttagttgatgaattacctgtcattccaacagagttccctcccgtgggaaatattgtcagttttgaacagaaagccacagtccaacctcagg
ctatcacagatagtttagccaccaaattacccacacctactggcagtaccaagaagccctgggatatggatgactactcaccttctgcttcagga
cctcttggaaagctagacatatcagaaattaaggaagaagtgctccagagtacaactggcgtctctcattatgctacggattcatgggatggtgt
cgtggaagataaacaaacacaagaatcggttacacagattgaacaaatagaagtgggtcctttggtaacatctatggaaatcttaaagcacattc
cttccaaggaattccctgtaactgaaacaccattggtaactgcaagaatgatcctggaatccaaaactgaaaagaaaatggtaagcactgtttctg
aattggtaaccacaggtcactatggattcaccttgggagaagaggatgatgaagacagaacacttacagttggatctgatgagagcaccttgat
ctttgaccaaattcctgaagtcattacggtgtcaaagacttcagaagacaccatccacactcatttagaagacttggagtcagtctcagcatccac
aactgtttcccctttaattatgcctgataataatggatcatccatggatgactgggaagagagacaaactagtggtaggataacggaagagtttctt
ggcaaatatctgtctactacaccttttccatcacagcatcgtacagaaatagaattgtttccttattctggtgataaaatattagtagagggaatttcc
acagttatttatccttctctacaaacagaaatgacacatagaagagaaagaacagaaacactaataccagagatgagaacagatacttatacaga
tgaaatacaagaagagatcactaaaagtccatttatgggaaaaacagaagaagaagtcttctctgggatgaaactctctacatctctctcagagc
caattcatgttacagagtcttctgtggaaatgaccaagtcttttgatttcccaacattgataacaaagttaagtgcagagccaacagaagtaagaga
tatggaggaagactttacagcaactccaggtactacaaaatatgatgaaaatattacaacagtgcttttggcccatggtactttaagtgttgaagca
gccactgtatcaaaatggtcatgggatgaagataatacaacatccaagcctttagagtctacagaaccttcagcctcttcaaaattgccccctgcc
ttactcacaactgtggggatgaatggaaaggataaagacatcccaagtttcactgaagatggagcagatgaatttactcttattccagatagtact
caaaagcagttagaggaggttactgatgaagacatagcagcccatggaaaattcacaattagatttcagccaactacatcaactggtattgcaga
aaagtcaactttgagagattctacaactgaagaaaaagttccacctatcacaagcactgaaggccaagtttatgcaaccatggaaggaagtgctt
tgggtgaagtagaagatgtggacctctctaagccagtatctactgttccccaatttgcacacacttcagaggtggaaggattagcatttgttagtta
tagtagcacccaagagcctactacttatgtagactcttcccataccattcctctttctgtaattcccaagacagactggggagtgttagtaccttctgt
tccatcagaagatgaagttctaggtgaaccctctcaagacatacttgtcattgatcagactcgccttgaagcgactatttctccagaaactatgaga
acaacaaaaatcacagagggaacaactcaggaagaattcccttggaaagaacagactgcagagaaaccagttcctgctctcagttctacagct
tggactcccaaggaggcagtaacaccactggatgaacaagagggcgatggatcagcatatacagtctctgaagatgaattgttgacaggttct
gagagggtcccagttttagaaacaactccagttggaaaaattgatcacagtgtgtcttatccaccaggtgctgtaactgagcacaaagtgaaaac
agatgaagtggtaacactaacaccacgcattgggccaaaagtatctttaagtccagggcctgaacaaaaatatgaaacagaaggtagtagtac
aacaggatttacatcatctttgagtccttttagtacccacattacccagcttatggaagaaaccactactgagaaaacatccctagaggatattgatt
taggctcaggattatttgaaaagcccaaagccacagaactcatagaattttcaacaatcaaagtcacagttccaagtgatattaccactgccttca
gttcagtagacagacttcacacaacttcagcattcaagccatcttccgcgatcactaagaaaccacctctcatcgacagggaacctggtgaaga
aacaaccagtgacatggtaatcattggagaatcaacatctcatgttcctcccactacccttgaagatattgtagccaaggaaacagaaaccgata
ttgatagagagtatttcacgacttcaagtcctcctgctacacagccaacaagaccacccactgtggaagacaaagaggcctttggacctcaggc
gctttctacgccacagcccccagcaagcacaaaatttcaccctgacattaatgtttatattattgaggtcagagaaaataagacaggtcgaatgag
tgatttgagtgtaattggtcatccaatagattcagaatctaaagaagatgaaccttgtagtgaagaaacagatccagtgcatgatctaatggctga
aattttacctgaattccctgacataattgaaatagacctataccacagtgaagaaaatgaagaagaagaagaagagtgtgcaaatgctactgatg
tgacaaccaccccatctgtgcagtacataaatgggaagcatctcgttaccactgtgcccaaggacccagaagctgcagaagctaggcgtggc
cagtttgaaagtgttgcaccttctcagaatttctcggacagctctgaaagtgatactcatccatttgtaatagccaaaacggaattgtctactgctgt
gcaacctaatgaatctacagaaacaactgagtctcttgaagttacatggaagcctgagacttaccctgaaacatcagaacatttttcaggtggtga
gcctgatgttttccccacagtcccattccatgaggaatttgaaagtggaacagccaaaaaaggggcagaatcagtcacagagagagatactga
agttggtcatcaggcacatgaacatactgaacctgtatctctgtttcctgaagagtcttcaggagagattgccattgaccaagaatctcagaaaat
agcctttgcaagggctacagaagtaacatttggtgaagaggtagaaaaaagtacttctgtcacatacactcccactatagttccaagttctgcatc
agcatatgtttcagaggaagaagcagttaccctaataggaaatccttggccagatgacctgttgtctaccaaagaaagctgggtagaagcaact
cctagacaagttgtagagctctcagggagttcttcgattccaattacagaaggctctggagaagcagaagaagatgaagatacaatgttcaccat
ggtaactgatttatcacagagaaatactactgatacactcattactttagacactagcaggataatcacagaaagcttttttgaggttcctgcaacca
ccatttatccagtttctgaacaaccttctgcaaaagtggtgcctaccaagtttgtaagtgaaacagacacttctgagtggatttccagtaccactgtt
gaggaaaagaaaaggaaggaggaggagggaactacaggtacggcttctacatttgaggtatattcatctacacagagatcggatcaattaattt
taccctttgaattagaaagtccaaatgtagctacatctagtgattcaggtaccaggaaaagttttatgtccttgacaacaccaacacagtctgaaag
ggaaatgacagattctactcctgtctttacagaaacaaatacattagaaaatttgggggcacagaccactgagcacagcagtatccatcaacctg
gggttcaggaagggctgaccactctcccacgtagtcctgcctctgtctttatggagcagggctctggagaagctgctgccgacccagaaacca
ccactgtttcttcattttcattaaacgtagagtatgcaattcaagccgaaaaggaagtagctggcactttgtctccgcatgtggaaactacattctcc
actgagccaacaggactggttttgagtacagtaatggacagagtagttgctgaaaatataacccaaacatccagggaaatagtgatttcagagc
gattaggagaaccaaattatggggcagaaataaggggcttttccacaggttttcctttggaggaagatttcagtggtgactttagagaatactcaa
cagtgtctcatcccatagcaaaagaagaaacggtaatgatggaaggctctggagatgcagcatttagggacacccagacttcaccatctacagt
acctacttcagttcacatcagtcacatatctgactcagaaggacccagtagcaccatggtcagcacttcagccttcccctgggaagagtttacatc
ctcagctgagggctcaggtgagcaactggtcacagtcagcagctctgttgttccagtgcttcccagtgctgtgcaaaagttttctggtacagcttc
ctccattatcgacgaaggattgggagaagtgggtactgtcaatgaaattgatagaagatccaccattttaccaacagcagaagtggaaggtacg
aaagctccagtagagaaggaggaagtaaaggtcagtggcacagtttcaacaaactttccccaaactatagagccagccaaattatggtctagg
caagaagtcaaccctgtaagacaagaaattgaaagtgaaacaacatcagaggaacaaattcaagaagaaaagtcatttgaatcccctcaaaac
tctcctgcaacagaacaaacaatctttgattcacagacatttactgaaactgaactcaaaaccacagattattctgtactaacaacaaagaaaactt
acagtgatgataaagaaatgaaggaggaagacacttctttagttaacatgtctactccagatccagatgcaaatggcttggaatcttacacaactc
tccctgaagctactgaaaagtcacattttttcttagctactgcattagtaactgaatctataccagctgaacatgtagtcacagattcaccaatcaaa
aaggaagaaagtacaaaacattttccgaaaggcatgagaccaacaattcaagagtcagatactgagctcttattctctggactgggatcaggag
aagaagttttacctactctaccaacagagtcagtgaattttactgaagtggaacaaatcaataacacattatatccccacacttctcaagtggaaag
tacctcaagtgacaaaattgaagactttaacagaatggaaaatgtggcaaaagaagttggaccactcgtatctcaaacagacatctttgaaggta
gtgggtcagtaaccagcacaacattaatagaaattttaagtgacactggagcagaaggacccacggtggcacctctccctttctccacggacat
cggacatcctcaaaatcagactgtcaggtgggcagaagaaatccagactagtagaccacaaaccataactgaacaagactctaacaagaattc
ttcaacagcagaaattaacgaaacaacaacctcatctactgattttctggctagagcttatggttttgaaatggccaaagaatttgttacatcagcac
caaaaccatctgacttgtattatgaaccttctggagaaggatctggagaagtggatattgttgattcatttcacacttctgcaactactcaggcaacc
agacaagaaagcagcaccacatttgtttctgatgggtccctggaaaaacatcctgaggtgccaagcgctaaagctgttactgctgatggattccc
aacagtttcagtgatgctgcctcttcattcagagcagaacaaaagctcccctgatccaactagcacactgtcaaatacagtgtcatatgagaggtc
cacagacggtagtttccaagaccgtttcagggaattcgaggattccaccttaaaacctaacagaaaaaaacccactgaaaatattatcatagacc
tggacaaagaggacaaggatttaatattgacaattacagagagtaccatccttgaaattctacctgagctgacatcggataaaaatactatcatag
atattgatcatactaaacctgtgtatgaagacattcttggaatgcaaacagatatagatacagaggtaccatcagaaccacatgacagtaatgatg
aaagtaatgatgacagcactcaagttcaagagatctatgaggcagctgtcaacctttctttaactgaggaaacatttgagggctctgctgatgttct
ggctagctacactcaggcaacacatgatgaatcaatgacttatgaagatagaagccaactagatcacatgggctttcacttcacaactgggatcc
ctgctcctagcacagaaacagaattagacgttttacttcccacggcaacatccctgccaattcctcgtaagtctgccacagttattccagagattga
aggaataaaagctgaagcaaaagccctggatgacatgtttgaatcaagcactttgtctgatggtcaagctattgcagaccaaagtgaaataatac
caacattgggccaatttgaaaggactcaggaggagtatgaagacaaaaaacatgctggtccttcttttcagccagaattctcttcaggagctgag
gaggcattagtagaccatactccctatctaagtattgctactacccaccttatggatcagagtgtaacagaggtgcctgatgtgatggaaggatcc
aatcccccatattacactgatacaacattagcagtttcaacatttgcgaagttgtcttctcagacaccatcatctcccctcactatctactcaggcagt
gaagcctctggacacacagagatcccccagcccagtgctctgccaggaatagacgtcggctcatctgtaatgtccccacaggattcttttaagg
aaattcatgtaaatattgaagcaactttcaaaccatcaagtgaggaataccttcacataactgagcctccctctttatctcctgacacaaaattagaa
ccttcagaagatgatggtaaacctgagttattagaagaaatggaagcttctcccacagaacttattgctgtggaaggaactgagattctccaagat
ttccaaaacaaaaccgatggtcaagtttctggagaagcaatcaagatgtttcccaccattaaaacacctgaggctggaactgttattacaactgcc
gatgaaattgaattagaaggtgctacacagtggccacactctacttctgcttctgccacctatggggtcgaggcaggtgtggtgccttggctaag
tccacagacttctgagaggcccacgctttcttcttctccagaaataaaccctgaaactcaagcagctttaatcagagggcaggattccacgatag
cagcatcagaacagcaagtggcagcgagaattcttgattccaatgatcaggcaacagtaaaccctgtggaatttaatactgaggagcaacacc
accattttcccttctggagacttctaatgaaacagatttcctgattggcattaatgaagagtcagtggaaggcacggcaatctatttaccaggacct
gatcgctgcaaaatgaacccgtgccttaacggaggcacctgttatcctactgaaacttcctacgtatgcacctgtgtgccaggatacagcggag
aacagtgtgaacttgattttgatgaatgtcactctaatccctgtcgtaatggagccacttgtgttgatggttttaacacattcaggtgcctctgccttcc
aagttatgttggtgcactttgtgagcaagataccgagacatgtgactatggctggcacaaattccaagggcagtgctacaaatactttgcccatc
gacgcacatgggatgcagctgaacgggaatgccgtctgcagggtgcccatctcacaagcatcctgtctcacgaagaacaaatgtttgttaatcg
tgtgggccatgattatcagtggataggcctcaatgacaagatgtttgagcatgacttccgttggactgatggcagcacactgcaatacgagaatt
ggagacccaaccagccagacagcttcttttctgctggagaagactgtgttgtaatcatttggcatgagaatggccagtggaatgatgttccctgc
aattaccatctcacctatacgtgcaagaaaggaacagttgcttgcggccagccccctgttgtagaaaatgccaagacctttggaaagatgaaac
ctcgttatgaaatcaactccctgattagataccactgcaaagatggtttcattcaacgtcaccttccaactatccggtgcttaggaaatggaagatg
ggctatacctaaaattacctgcatgaacccatctgcataccaaaggacttattctatgaaatactttaaaaattcctcatcagcaaaggacaattcaa
taaatacatccaaacatgatcatcgttggagccggaggtggcaggagtcgaggcgctgatccctaaaatggcgaacatgtgttttcatcatttca
gccaaagtcctaacttcctgtgcctttcctatcacctcgagaagtaattatcagttggtttggatttttggaccaccgttcagtcattttgggttgccgt
gctcccaaaacattttaaatgaaagtattggcattcaaaaagacagcagacaaaatgaaagaaaatgagagcagaaagtaagcatttccagcct
atctaatttctttagttttctatttgcctccagtgcagtccatttcctaatgtataccagcctactgtactatttaaaatgctcaatttcagcaccgatggc
catgtaaataagatgatttaatgttgattttaatcctgtatataaaataaaaagtcacaatgagtttgggcatatttaatgatgattatggagccttaga
ggtctttaatcattggttcggctgcttttatgtagtttaggctggaaatggtttcacttgctctttgactgtcagcaagactgaagatggcttttcctgg
acagctagaaaacacaaaatcttgtaggtcattgcacctatctcagccataggtgcagtttgcttctacatgatgctaaaggctgcgaatgggatc
ctgatggaactaaggactccaatgtcgaactcttctttgctgcattcctttttcttcacttacaagaaaggcctgaatggaggacttttctgtaaccagg

| | | |
|---|---|---|
| Defensin, | 25 | BC033298, BC047677, NM_005218, X92744 |
| beta 1 | | ctccaaaggagccagcgtctccccagttcctgaaatcctgggtgttgcctgccagtc |
| (DEFB1) | | gccatgagaacttcctaccttctgctgtttactctctgcttacttttgtctgagatggcct |
| | | caggtggtaactttctcacaggccttggccacagatctgatcattacaattgcgtcag |
| | | cagtggagggcaatgtctctattctgcctgcccgatctttaccaaaattcaaggcacc |
| | | tgttacagagggaaggccaagtgctgcaagtgagctgggagtgaccagaagaaa |
| | | gacgcagaagtgaaatgaactttttataagcattcttttaataaaggaaaattgcttttg |
| | | aagtataaaaaaaaaaaaaaaaaaaaaaaaaaaaaaaaaa |
| Desmoglein 2 | 26 | NM_001943, BC099656, BC099657, BC099655, Z26317 |
| (DSG2) | | BC014581, BC014584, BC017410, BC022413 |
| | | sequence below |

ggcgcggagcggtgcggcggcgggaggcggaggcgagggtgcgatggcgcggagcccgggacgcgcgtacgccctgctgcttctcct
gatctgctttaacgttggaagtggacttcacttacaggtcttaagcacaagaaatgaaaataagctgcttcctaaacatcctcatttagtgcggcaa
aagcgcgcctggatcaccgcccccgtggctcttcgggagggagaggatctgtccaagaagaatccaattgccaagatacattctgatcttgca
gaagaaagaggactcaaaattacttacaaatacactggaaaagggattacagagccaccttttggtatatttgtctttaacaaagatactggagaa
ctgaatgttaccagcattcttgatcgagaagaaacaccattttttctgctaacaggttacgctttggatgcaagaggaaacaatgtagagaaaccc
ttagagctacgcattaaggttcttgatatcaatgacaacgaaccagtgttcacacaggatgtctttgttgggtctgttgaagagttgagtgcagcac
atactcttgtgatgaaaatcaatgcaacagatgcagatgagcccaataccctgaattcgaaaatttcctatagaatcgtatctctggagcctgcttat
cctccagtgttctacctaaataaagatacaggagagatttatacaaccagtgttaccttggacagagaggaacacagcagctacactttgacagt
agaagcaagagatggcaatggagaagttacagacaaacctgtaaaacaagctcaagttcagattcgtattttggatgtcaatgacaatatacctg
tagtagaaaataaagtgcttgaagggatggttgaagaaaatcaagtcaacgtagaagttacgcgcataaaagtgttcgatgcagatgaaatagg
ttctgataattggctggcaaattttacatttgcatcaggaaatgaaggaggttatttccacatagaaacagatgctcaaactaacgaaggaattgtg
acccttattaaggaagtagattatgaagaaatgaagaatcttgacttcagtgttattgtcgctaataaagcagcttttcacaagtcgattaggagtaa
atacaagcctacacccattcccatcaaggtcaaagtgaaaaatgtgaaagaaggcattcattttaaaagcagcgtcatctcaatttatgttagcga
gagcatggatagatcaagcaaaggccaaataattggaaattttcaagcttttgatgaggacactggactaccagcccatgcaagatatgtaaaat
tagaagatagagataattggatctctgtggattctgtcacatctgaaattaaacttgcaaaacttcctgattttgaatctagatatgttcaaaatggca
catacactgtaaagattgtggccatatcagaagattatcctagaaaaaccatcactggcacagtccttatcaatgttgaagacatcaacgacaact
gtcccacactgatagagcctgtgcagacaatctgtcacgatgcagagtatgtgaatgttactgcagaggacctggatggacacccaaacagtg
gccctttcagtttctccgtcattgacaaaccacctggcatggcagaaaaatggaaaatagcacgccaagaaagtaccagtgtgctgctgcaaca
aagtgagaaaaagcttgggagaagtgaaattcagttcctgatttcagacaatcagggttttagttgtcctgaaaagcaggtccttacactcacagt
ttgtgagtgtctgcatggcagcggctgcagggaagcacagcatgactcctatgtgggcctgggacccgcagcaattgcgctcatgattttggc
ctttctgctcctgctattggtaccacttttactgctgatgtgccattgcggaaagggcgccaaaggctttacccccatacctggcaccatagagat
gctgcatccttggaataatgaaggagcaccacctgaagacaaggtggtgccatcatttctgccagtggatcaagggggcagtctagtaggaag
aaatggagtaggaggtatggccaaggaagccacgatgaaaggaagtagctctgcttccattgtcaaagggcaacatgagatgtccgagatgg
atggaaggtgggaagaacacagaagcctgctttctggtagagctacccagtttacaggggccacaggcgctatcatgaccactgaaaccacg
aagaccgcaagggccacaggggcttccagagacatggccggagctcaggcagctgctgttgcactgaacgaagaattcttaagaaattatttc
actgataaagcggcctcttacactgaggaagatgaaaatcacacagccaaagattgccttctggtttattctcaggaagaaactgaatcgctgaa
tgcttctattggttgttgcagttttattgaaggagagctagatgaccgcttcttagatgatttgggacttaaattcaagacactagctgaagtttgcct
gggtcaaaaaatagatataaataaggaaattgagcagagacaaaaacctgccacagaaacaagtatgaacacagcttcacattcactctgtga
gcaaactatggttaattcagagaatacctactcctctggcagtagcttcccagttccaaaatctttgcaagaagccaatgcagagaaagtaactca
ggaaatagtcactgaaagatctgtgtcttctaggcaggcgcaaaaggtagctacacctcttcctgacccaatggcttctagaaatgtgatagcaa
cagaaacttcctatgtcacagggtccactatgccaccaaccactgtgatcctgggtcctagccagccacagagccttattgtgacagagagggt
gtatgctccagcttctaccttggtagatcagccttatgctaatgaaggtacagttgtggtcactgaaagagtaatacagcctcatgggggtggatc
gaatcctctggaaggcactcagcatcttcaagatgtaccttacgtcatggtgagggaaagagagagcttccttgcccccagctcaggtgtgcag
cctactctggccatgcctaatatagcagtaggacagaatgtgacagtgacagaaagagttctagcacctgcttccactctgcaatccagttacca
gattcccactgaaaattctatgacggctaggaacaccacggtgtctggagctggagtccctggccctctgccagattttggtttagaggaatctg
gtcattctaattctaccataaccacatcttccaccagagttaccaagcatagcactgtacagcattcttactcctaaacagcagtcagccacaaact
gacccagagtttaattagcagtgactaatt

| | | |
|---|---|---|
| EGF-like- | 27 | NM_015507, BC038587, AY358333, AF186084, |
| domain, | | DQ031339 |
| multiple 6 | | NM_001408, AF234887, AK124727, D87469 |
| (EGFL6) | | Sequence below |

ccgcagaggagcctcggccaggctagccagggcgcccccagcccctccccaggccgcgagcgcccctgccgcggtgcctggcctcccct
cccagactgcagggacagcacccggtaactgcgagtggagcggaggacccgagcggctgaggagagaggaggcggcggcttagctgct
acggggtccggccggcgccctcccgaggggggctcaggaggaggaaggaggacccgtgcgagaatgcctctgccctggagccttgcgct
cccgctgctgctctcctgggtggcaggtggtttcgggaacgcggccagtgcaaggcatcacgggttgttagcatcggcacgtcagcctgggg
tctgtcactatggaactaaactggcctgctgctacggctggagaagaaacagcaagggagtctgtgaagctacatgcgaacctggatgtaagtt
tggtgagtgcgtgggaccaaacaaatgcagatgctttccaggatacaccgggaaaacctgcagtcaagatgtgaatgagtgtggaatgaaac
cccggccatgccaacacagatgtgtgaatacacacggaagctacaagtgcttttgcctcagtggccacatgctcatgccagatgctacgtgtgt
gaactctaggacatgtgccatgataaactgtcagtacagctgtgaagacacagaagaagggccacagtgcctgtgtccatcctcaggactccg
cctggccccaaatggaagagactgtctagatattgatgaatgtgcctctggtaaagtcatctgtccctacaatcgaagatgtgtgaacacatttgg
aagctactactgcaaatgtcacattggtttcgaactgcaatatatcagtggacgatatgactgtatagatataaatgaatgtactatggatagccata
cgtgcagccaccatgccaattgcttcaatacccaagggtccttcaagtgtaaatgcaagcagggatataaaggcaatggacttcggtgttctgct
atccctgaaaattctgtgaaggaagtcctcagagcacctggtaccatcaaagacagaatcaagaagttgcttgctcacaaaaacagcatgaaaa
agaaggcaaaaattaaaaatgttaccccagaacccaccaggactcctacccctaaggtgaacttgcagcccttcaactatgaagagatagtttc
cagaggcgggaactctcatggaggtaaaaaagggaatgaagagaaaatgaaagaggggcttgaggatgagaaaagagaagagaaagccc
tgaagaatgacatagaggagcgaagcctgcgaggagatgtgtttttccctaaggtgaatgaagcaggtgaattcggcctgattctggtccaaag
gaaagcgctaacttccaaactggaacataaagatttaaatatctcggttgactgcagcttcaatcatgggatctgtgactggaaacaggatagag
aagatgattttgactggaatcctgctgatcgagataatgctattggcttctatatggcagttccggccttggcaggtcacaagaaagacattggcc
gattgaaacttctcctacctgacctgcaaccccaaagcaacttctgtttgctctttgattaccggctggccggagacaaagtcgggaaacttcgag
tgtttgtgaaaaacagtaacaatgccctggcatgggagaagaccacgagtgaggatgaaaagtggaagacagggaaaattcagttgtatcaa
ggaactgatgctaccaaaagcatcatttttgaagcagaacgtggcaagggcaaaaccggcgaaatcgcagtggatggcgtcttgcttgtttcag
gcttatgtccagatagccttttatctgtggatgactgaatgttactatctttatatttgactttgtatgtcagttccctggtttttttgatattgcatcatag
gacctctggcattttagaattactagctgaaaaattgtaatgtaccaacagaaatattattgtaagatgcctttcttgtataagatatgccaatatttgctt
taaatatcatatcactgtatcttctcagtcatttctgaatctttccacattatattataaaatatggaaatgtcagtttatctcccctcctcagtatatctga
tttgtataagtaagttgatgagcttctctctacaacatttctagaaaatagaaaaaaaagcacagagaaatgtttaactgtttgactcttatgatacttct
tggaaactatgacatcaaagatagacttttgcctaagtggcttagctgggtctttcatagccaaacttgtatatttaaattctttgtaataataatatcca
aatcatcaaaaaaaaaaaaaaaaa

| | | |
|---|---|---|
| Eukaryotic | 28 | AK027011, BC078179, AK074361, AL137627, |
| translation | | AL137676, AL157497, BC009350, NM_001013703, |
| initiation | | AB037759, AJ243428 |
| factor 2 alpha | | |
| kinase 4 | | |
| (EIF2AK4) | | |
| EPB41L3 | 29 | AF515797-Sequence below |
| (Erythrocyte | | AL832598 NM_012307, AB023204, AK090875, |
| membrane | | AK094952 |
| protein band | | |
| 4.1-like 3) | | |

atttacaataaatgaagattaccctcaaatgctagaagctgtctaggtccgtccggtgtgtcagattttcctcagattagatgtgccaataaccaagt
ttattcagtaaacaacttgtacttgtttcatctggttttattactctcacccataaacaggaatgactctttgaccctctggaaatatgtaatgcttccaat
cttgctttgtgtatctcatttaatttgttataaggtagtactgattttagcatattaatgcgatttcttccttgttgtttgctttggtctgtgttcaatccag
agagcttaaattgtcattattttgggaagaaaacctgtatttttgttagtttacaatattatgaaatttcacttcaggagaaactgctgggcttcctgtggct
ttgttttcttagttactttttccgtgccgtgtattttttaattgatttttcttcttttacttgaaaagaaagtgttttattttcaaatctggtccatatttac
attctagttcagagccaagccttaaactgtacagaatttccactgtaattaaaactatttagtgttagttataaatagccttcaaaaagagagattctccatt
cacgatcacctgcatcacagcccatggtgaatgtatgtttctgcatagcgaaataaaaatggcaaatgcaaaaaaaaaaaaaaaaaaaaaaaaaaaa

| | | |
|---|---|---|
| Endothelial | 30 | gctgcttcccaccagcaaagaccacgactggagagccgagccggaggcagctg |
| cell-specific | | ggaaacatgaagagcgtcttgctgctgaccacgctcctcgtgcctgcacacctggt |
| molecule 1 | | ggccgcctggagcaataattatgcggtggactgccctcaacactgtgacagcagtg |
| (ESM1; | | agtgcaaaagcagcccgcgctgcgagaggacagtgctcgacgactgtggctgct |
| endocan) | | gccgagtgtgcgctgcagggcggggagaaacttgctaccgcacagtctcaggca |
| BCO11989 | | ggatggcatgaagtgtggcccggggctgaggtgtcagccttctaatggggaggat |
| | | ccttttggtgaagagtttggtatctgcaaagactgtccctacggcaccttcgggatgg |
| | | attgcagagagacctgcaactgccagtcaggcatctgtgacagggggacgggaa |
| | | aatgcctgaaattccccttcttccaatattcagtaaccaagtcttccaacagatttgtttc |
| | | tctcacggagcatgacatggcatctggagatggcaatattgtgagagaagaagttg |
| | | gaaagagaatgctgccgggtctcccgtaatgaggaaatggttaaatccacgctgat |
| | | cccggctgtgatttctgagagaaggctctattttcgtgattgttcaacacacagccaa |
| | | cattttaggaactttctagattatagcataaggacatgtaatttttgaagaccaaatgtg |
| | | atgcatggtggatccagaaaacaaaaagtaggatacttacaatccataacatccata |
| | | tgactgaacacttgtatgtgtttgttaaatattcgaatgcatgtagatttgttaaatgtgtg |
| | | tgtatagtaacactgaagaactaaaaatgcaatttaggtaatcttacatggagacagg |
| | | tcaaccaaagagggagctaggcaaagctgaagaccgcagtgagtcaaattagttc |
| | | ttgactttgatgtacattaatgttgggatatggaatgaagacttaagagcaggagaag |
| | | atggggagggggtgggagtgggaaataaaatatttagcccttccttggtaggtagc |
| | | tctctagaatttaattgtgctttttttttttggctttgggaaaagtcaaaataaaacaa |
| | | ccagaaaacccctgaaggaagtaagatgtttgaagcttatggaaatttgagtaacaaaca |
| | | gctttgaactgagagcaatttcaaaaggctgctgatgtagttcccgggttacctgtatt |
| | | gaaggacggttctggggcataggaaacacatacacttccataaatagctttaacgtatgc |
| | | cacctcagagataaatctaagaagtattttacccactggtggtttgtgtgtgtatgaagg |
| | | taaatatttatatatttttataaataaatgtgttagtgcaagtcatcttccctacccata |
| | | tttatcatcctcttgaggaaagaaatctagtattatttgttgaaaatggttagaataaaa |
| | | ctatgactctataaggttttcaaacatctgaggcatgataaatttattatccataattat |
| | | agtaataataaccttaataagcataagaaaaacagagtcactctggatttcaaaaatgtc |
| | | aaaaaaaaaaaaaa |
| F-box protein | 31 | NM_058229, NM_148177, BC024030, AJ420108, |
| 32 (FBXO32) | | AK056986 |
| FJX1 (Four | 32 | NM_014344, AJ245599, AK026069, BC049171, |
| jointed box 1) | | BC071898 |
| FOLH1 (Folate | 33 | BC025672 |
| hydrolase | | NM_004476 |
| (prostate- | | AF176574 |
| specific | | M99487 |
| membrane | | NM_001014986 |
| antigen) 1 | | |
| Family with | 34 | BC008865 |
| sequence | | NM_032231 |
| similarity 96, | | NM_001014812 |
| member A | | |
| (FLJ22875) | | |
| FLJ46072 | 35 | BC033256, NM_198488, AK127960 |
| Coagulation | 36 | BC012453 |
| factor II | | BC018130 |
| (thrombin) | | NM_005242 |
| receptor-like 1 | | |
| (F2RL1; | | |
| GPR11) | | |
| Frizzled 10 | 37 | AB027464, BC070037, NM_007197 |
| (FZD10) | | Sequence below |

acacgtccaacgccagcatgcagcgcccgggcccccgcctgtggctggtcctgcaggtgatgggctcgtgcgccgccatcagctccatgga
catggagcgcccgggcgacggcaaatgccagcccatcgagatcccgatgtgcaaggacatcggctacaacatgactcgtatgcccaacctg
atgggccacgagaaccagcgcgaggcagccatccagttgcacgagttcgcgccgctggtggagtacggctgccacggccacctccgcttct
tcctgtgctcgctgtacgcgccgatgtgcaccgagcaggtctctacccccatccccgcctgccgggtcatgtgcgagcaggcccggctcaagt
gctccccgattatggagcagttcaacttcaagtggcccgactccctggactgccggaaactccccaacaagaacgaccccaactacctgtgca
tggaggcgcccaacaacggctcggacgagcccacccggggctcgggcctgttcccgccgctgttccggccgcagcggccccacagcgcg
caggagcacccgctgaaggacgggggccccgggcgcggcggctgcgacaacccgggcaagttccaccacgtggagaagagcgcgtcg
tgcgcgccgctctgcacgcccggcgtggacgtgtactggagccgcgaggacaagcgcttcgcagtggtctggctggccatctgggcggtgc
tgtgcttcttctccagcgccttcaccgtgctcaccttcctcatcgacccggcccgcttccgctaccccgagcgccccatcatcttcctctccatgtg
ctactgcgtctactccgtgggctacctcatccgcctcttcgccggcgccgagagcatcgcctgcgaccgggacagcggccagctctatgtcat
ccaggagggactggagagcaccggctgcacgctggtcttcctggtcctctactacttcggcatggccagctcgctgtggtgggtggtcctcac
gctcacctggttcctggccgccggcaagaagtggggccacgaggccatcgaagccaacagcagctacttccacctggcagcctgggccatc
ccggcggtgaagaccatcctgatcctggtcatgcgcagggtggcgggggacgagctcaccggggtctgctacgtgggcagcatggacgtc
aacgcgctcaccggcttcgtgctcattcccctggcctgctacctggtcatcggcacgtccttcatcctctcgggcttcgtggccctgttccacatc
cggagggtgatgaagacgggcggcgagaacacggacaagctggagaagctcatggtgcgtatcgggctcttctctgtgctgtacaccgtgc
cggccacctgtgtgatcgcctgctacttttacgaacgcctcaacatggattactggaagatcctggcggcgcagcacaagtgcaaaatgaaca
accagactaaaacgctggactgcctgatggccgcctccatccccgccgtggagatcttcatggtgaagatctttatgctgctggtggtggggat
caccagcgggatgtggatttggacctccaagactctgcagtcctggcagcaggtgtgcagccgtaggttaaagaagaagagccggagaaaa
ccggccagcgtgatcaccagcggtgggatttacaaaaaagcccagcatccccagaaaactcaccacgggaaatatgagatccctgcccagt
cgcccacctgcgtgtgaacagggctggagggaagggcacaggggcgcccggagctaagatgtggtgcttttcttggttgtgtttttctttcttctt
cttcttttttttttttttataaaagcaaaagagaaatacataaaaaagtgtttaccctgaaattcaggatgctgtgatacactgaaaggaaaaatgtact
taaagggttttgttttgttttggttttccagcgaagggaagctcctccagtgaagtagcctcttgtgtaactaatttgtggtaaagtagttgattcagcc
ctcagaagaaaacttttgtttagagccctccgtaaatatacatctgtgtatttgagttggctttgctacccatttacaaataagaggacagataactg
ctttgcaaattcaagagcctcccctgggttaacaaatgagccatccccagggcccacccccaggaaggccacagtgctgggcggcatccctg
cagaggaaagacaggacccggggcccgcctcacaccccagtggatttggagttgcttaaaatagactctggccttcaccaatagtctctctgc
aagacagaaacctccatcaaacctcacatttgtgaactcaaacgatgtgcaatacatttttttctctttccttgaaaataaaaagagaaacaagtattt
tgctatatataaagacaacaaaagaaatctcctaacaaaagaactaagaggcccagccctcagaaacccttcagtgctacattttgtggcttttta
atggaaaccaagccaatgttatagacgtttggactgatttgtggaaaggaggggggaagagggagaaggatcattcaaaagttacccaaagg
gcttattgactctttctattgttaaacaaatgatttccacaaacagatcaggaagcactaggttggcagagacactttgtctagtgtattctcttcaca
gtgccaggaaagagtggtttctgcgtgtgtatatttgtaatatatgatatttttcatgctccactattttattaaaaataaaatatgttctttaaaaaaa

| | | |
|---|---|---|
| Glycoprotein | 38 | BC008151, BC047295, NM_005278, NM_001001994, |
| M6B (GPM6B) | | NM_001001996, U45955 |
| P2RY14 | 39 | BC034989 |
| (Purinergic | | NM_014879 |
| receptor P2Y, | | D13626 |
| G-protein | | |
| coupled, 14 | | |
| (GPR105) | | |
| Homeo box B7 | 40 | cgtaaaaccgacactaaaacgtccctgcctacaaatcatccggccaaattatga |
| HOXB7) | | gttcattgtattatgcgaatgctttattttctaaatatccagcctcaagttcggttttcg |
| BC015345 | | ctaccg |
| | | gagccttcccagaacaaacttcttgtgcgtttgcttccaacccccagcgcccggg |
| | | ctatggagcgggttcgggcgcttccttcgccgcctcgatgcagggcttgtaccc |
| | | cggcggggggggcatggcgggccagagcgcggccggcgtctacgcggcc |
| | | ggctatgggctcgagccgagttccttcaacatgcactgcgcgccctttgagcag |
| | | aacctctccggggtgtgtcccggcgactccgccaaggcggcgggcgccaag |
| | | gagcagagggactcggacttggcggccgagagtaacttccggatctacccctg |
| | | gatgcgaagctcaggaactgaccgcaaacgaggccgccagacctacacccg |
| | | ctaccagaccctggagctggagaaagaatttcactacaatcgctacctgacgcg |
| | | gcggcggcgcatcgagatcgcgcacacgctctgcctcacggaaagacagatc |
| | | aagatttggtttcagaaccggcgcatgaagtggaaaaaggagaacaagaccgc |
| | | gggcccggggaccaccggccaagacagggctgaagcagaggaggaagag |
| | | gaagagtgagggatggagaaagggcagaggaagagacatgagaaagggag |
| | | aggaagagaagcccagctctgggaactgaatcaggaaactcaaatcgaatag |
| | | ggaagtaaaaaaacaaaacaaaaaacaaaaaaaaaaaaaa |
| Immunoglobulin | 41 | NM_014333, BC047021, NM_145296, NM_021189, |
| superfamily, | | BC125103, AB017563, AK172730 AL080181 |
| member 4 | | |
| (IGSF4) | | |
| FLJ35593 fis | 42 | NM_006469, NM_016389, DQ050632, AK001273, |
| (IVNS1ABP) | | AK023020, AK092912, AK093912, AJ012449 |
| Potassium | 43 | BC060793 |
| channel, | | NM_003740 |
| subfamily K, | | AF084830 |
| member 5 | | AK001897 |
| (KCNK5) | | |
| Leucine zipper, | 44 | NM_021020 |
| putative tumor | | AF123659 |
| suppressor 1 | | |
| (LZTS1) | | |
| clone | 45 | BC038772 |
| IMAGE:5270727 | | Sequence below. |
| (MCM4) | | |

gctccgagtggcggttgtttcaagatggcggacgtggcgggcccctcccgccccagtgccgcggcgttctggagccgggacttttctgatga
agaacaatcagtagtatacgttccaggaatttctgctgaaggaaatgtcagatcaagacacaagctgatgagtccaaaagctgatgttaaactta
agacttccagggtgactgatgcttcaatctccatggagtccttaaaaggcacaggagattcagtagatgaacagaattcctgcaggggagaaat
aaagagtgcatcattgaaggatttatgtcttgaagacaaaagacgcattgcaaacttaattaaagaactggccagagtaagtgaggaaaaggaa
gtgacagaggaaagactgaaagctgagcaggagtcatttgagaagaagatcaggcagttggaagaacagaatgaactgatcatcaaagaaa
gggaagatatccttttgaaagttctcttttttaacgttcaagaagtttgactatttctttttttttttgagacgaaatctcgctcttgtcgcctaggctgcag
tgcaatggtgcgatttcagttcaccgcaacctccacctcccggttcaagcgattctcctaccccagctactcgggaggttgaggcaggagaatc
gcttaaacccaggcggcagaggttgcagtgagccaagatcgcgccactgcactccagcctcagcaatagagtgagactgtctcaaaaaaaaa
aaaaaaaaaaacctgccaattttcaaacataccgtagagattattttcaggtgccattttatagtatagcagcagggcttttactctgtgtatgcaca
gatgcagtctggggcatggtttgtgtgctggactttctcatggccatcatcagtatgcttatggatttgatgacaggcatagcctgggcatatcacc
tcattggtaaagggcatagagcctttcttttttatggcacttctttttttgagatagggtcttactctgtcaccctggctagagtacactggtacaatcac
ggctcaatgtaggcttaacctcctgggctcaggtgtatgtcactatgcccggctactttttgtattttttggtagagacggcttcgccacgttgccca
ggctgcaagcgatatgcctaggctcaagcgatctgcccacctcaacttccggaagtgctgagattacaggtgtgagccactgcacccagccttt
gttttattttttattttttgagaggtatgattctttctagagattttttctcatggctactattagatcaggaatgggtgattggagattattagattctagg
ttaacttctaccactttaccctaatacataaaactttttcctaaataaatgatggaaggaataatacttggttacctggcattatttttcagtaagaaaaaa
gctttactaaccactacatttatggaaatttgtaggggtaagtattttataggtcataaaaaacaccataatataacgaatctcattttctttaaatgtga
attaaatcctaacagtcatctttataaaatgaccataggctaaaatcttacgtgtaagtactactacaataaataatttctgaaacctttaaaaaaaaa
aaaaaaaaaaaaagaaaaaaaaaaaaaaaaa

| | | |
|---|---|---|
| Nidogen 2 | 46 | BC035608, NM_007361, AJ223500, D86425 |
| (osteonidogen) | | |
| (NID2) | | |
| Olfactomedin- | 47 | BC067274 |
| like 2B | | NM_015441 |
| (OlfM12B) | | BC047472 |
| Oxysterol | 48 | BC017731 |
| binding protein- | | AL832293 |
| like 3 | | |
| (OSBPL3) | | |
| Protocadherin | 49 | AL137505 |
| 17 (PCDH17) | | Sequence below. |

cggacgcgtgggcatgtatgtaccagcagtggttacttgcattgtgtagtgtttttcaagaggtctgggtcttaacaaaatgttttcctttatctcagt
gctcttctgcctctttttgttggtgtcctttgagaacaatacaccttctattccttcatttggttacacctttccttgtgacatttagcgagtttcaaactta
cttccatatgaggctaagaaacctcaaatttcaggaattgggaaaaataaaattagcacttgcagaagtagcagcagatgggaaaatgccttgatt
gacattttctttcagcatttaaaatttttggcattttacagcttcatgacaaacagttttgtgcccataccttagaaaatgtggtgctgagttaaataaag
gctgtttgagcactggagcagaaaaatgcattatttgcaaactggtggataattttgtgccttctcttctggccaccaagccagtgtagaaacagc
aaaaatgtcataaaaattcttatatttaaaacaaaaacaaaagcaaaaacaaacattgaattaaattaagttttgtaattttaaactttaaaaacttctac
tgaaaatatttccgccaaatgccatcaatattttagactgtacctcgtttgcaaaactgctttgagagggaagagtggacaactcccatcagcctta
ttctcttgagaactatattttggttcctagtaacagcctttccaaagctctactcttggtttttattactcataaatgtttaaattagaaaagaagggacct
tgtacatgtgaaacctaattgactctctatattttggacaatttatgtatctgaaatgtgttgtctctgttatatgatgttatttttgccaggagactacag
gttgatttagcttgatagctgaaatttgatggaaaactgatttccatttagtcttaccaagtgttgcttctctcttactagacagatatccacttagtaaa
atctaaagcagtatgtaaatgaaaccagcaaagagagtagggtttattttataaacattcttaatgctaagtaaccagttgttcaatttattatatgtgt
ctgaggacattaaaacaccataagattgtaataattggttgtgccaatgtgtgagggatttacctttaggctctctgtcaccagtgatttactagtgtt
agctgtttaacacattatctgtatttagtagtgattatttatttacaagttggtggtaattcagcagtcaggactctaagcttttatagttgaattgagga
aatctcgcttttattcatttagctggcaactgcctttattgcagacctctggtgcttggctttcaaggaagcctatgagatgccaaaatcacaccttta
gagagcaccttgctctaataggtgatgcatgagcaaacagtgagatttgaaggggttttaacataatttagaatgtgaaaaaaatatcaattcatat
ctttcaagtactaacccctcaaaaaagcccacacatacaaaatatgtgatgtgataccactttgtcttttaggtctttaagtaactgaagttaagcac
agaaaaaaaaatcacttcatggaaatttcagtaagaaacccaaacttctaaaaattgcttgcagatgagctagaaaaaaaaaaaaaaaaaaa

| | | |
|---|---|---|
| Phospholipase | 50 | NM_016341, AF117948, AF190642, AL050031, |
| C, epsilon 1 | | AB040949, AK022543 |
| (PLCE1) | | |
| Plexin domain | 51 | BC036059, AF279144, AY704670, AY704671, |
| containing 1 | | AY704672, AK093589, AK127539 |
| (PLXDC1) | | |
| PR domain | 52 | NM_001198 |
| containing 1, | | NM_182907 |
| with ZNF | | AY198414 |
| domain | | AY198415 |
| (PRDM1) | | |
| Response gene | 53 | BC066334 NM_014059, AF036549, AK091099, |
| to complement | | AK095079 |
| 32 (RGC32) | | |
| Regulator of | 54 | BC015510 |
| G-protein | | NM_002922 |
| signalling 1 | | |
| (RGS1) | | |
| Ribonucleotide | 55 | NM_001034 |
| reductase M2 | | X59618 |
| polypeptide | | |
| (RRM2) | | |
| Sodium | 56 | BC006526 |
| channel, | | Sequence below. |
| nonvoltage- | | |
| gated 1 alpha | | |
| (SCNN1A) | | |

gggcactcagggcccagagctcagccttgaccctgacccttgctctccccaatccactccggggctcatgaaggggaacaagctggaggag
caggaccctagacctctgcagcccataccaggtctcatggaggggaacaagctggaggagcaggactctagccctccacagtccactccag
ggctcatgaaggggaacaagcgtgaggagcaggggctgggccccgaacctgcggcgccccagcagcccacggcggaggaggaggcc
ctgatcgagttccaccgctcctaccgagagctcttcgagttcttctgcaacaacaccaccatccacggcgccatccgcctggtgtgctcccagc
acaaccgcatgaagacggccttctgggcagtgctgtggctctgcacctttggcatgatgtactggcaattcggcctgcttttcggagagtacttc
agctaccccgtcagcctcaacatcaacctcaactcggacaagctcgtcttccccgcagtgaccatctgcaccctcaatccctacaggtacccgg
aaattaaagaggagctggaggagctggaccgcatcacagagcagacgctctttgacctgtacaaatacagctccttcaccactctcgtggccg
gctcccgcagccgtcgcgacctgcgggggactctgccgcaccccttgcagcgcctgagggtcccgcccccgcctcacggggcccgtcgag
cccgtagcgtggcctccagcttgcgggacaacaacccccaggtggactggaaggactggaagatcggcttccagctgtgcaaccagaacaa
atcggactgcttctaccagacatactcatcaggggtggatgcggtgagggagtggtaccgcttccactacatcaacatcctgtcgaggctgcca
gagactctgccatccctggaggaggacacgctgggcaacttcatcttcgcctgccgcttcaaccaggtctcctgcaaccaggcgaattactctc
acttccaccacccgatgtatggaaactgctatactttcaatgacaagaacaactccaacctctggatgtcttccatgcctggaatcaacaacggtc
tgtccctgatgctgcgcgcagagcagaatgacttcattcccctgctgtccacagtgactggggcccgggtaatggtgcacgggcaggatgaa
cctgcctttatggatgatggtggctttaacttgcggcctggcgtggagacctccatcagcatgaggaaggaaaccctggacagacttgggggc
gattatggcgactgcaccaagaatggcagtgatgttcctgttgagaacctttacccttcaaagtacacacagcaggtgtgtattcactcctgcttcc
aggagagcatgatcaaggagtgtggctgtgcctacatcttctatccgcggccccagaacgtggagtactgtgactacagaaagcacagttcct
gggggtactgctactataagctccaggttgacttctcctcagaccacctgggctgtttcaccaagtgccggaagccatgcagcgtgaccagcta
ccagctctctgctggttactcacgatggccctcggtgacatcccaggaatgggtcttccagatgctatcgcgacagaacaattacaccgtcaac
aacaagagaaatggagtggccaaagtcaacatcttcttcaaggagctgaactacaaaaccaattctgagtctccctctgtcacgatggtcaccct
cctgtccaacctgggcagccagtggagcctgtggttcggctcctcggtgttgtctgtggtggagatggctgagctcgtctttgacctgctggtca
tcatgttcctcatgctgctccgaaggttccgaagccgatactggtctccaggccgagggggcaggggtgctcaggaggtagcctccaccctg
gcatcctcccctccttcccacttctgcccccaccccatgtctctgtccttgtcccagccaggccctgctccctctccagccttgacagcccctccc
cctgcctatgccaccctgggcccccgcccatctccagggggctctgcaggggccagttcctccacctgtcctctgggggggccctgagagg
gaaggagaggtttctcacaccaaggcagatgctcctctggtgggagggtgctggccctggcaagattgaaggatgtgcagggcttcctctca
gagccgcccaaactgccgttgatgtgtggaggggaagcaagatgggtaagggctcaggaagttgctccaagaacagtagctgatgaagctg
cccagaagtgccttggctccagccctgtaccccttggtactgcctctgaacactctggtttccccacccaactgcggctaagtctctttttcccttg
gatcagccaagcgaaacttggagctttgacaaggaactttcctaagaaaccgctgataaccaggacaaaacacaaccaagggtacacgcag
gcatgcacgggtttcctgcccagcgacggcttaagccagcccccgactggcctggccacactgctctccagtagcacagatgtctgctcctcc
tcttgaacttgggtgggaaaccccacccaaaagccccctttgttacttaggcaattccccttccctgactcccgagggctagggctagagcaga
cccgggtaagtaaaggcagacccagggctcctctagcctcatacccgtgccctcacagagccatgccccggcacctctgccctgtgtctttcat
acctctacatgtctgcttgagatatttcctcagcctgaaagtttccccaaccatctgccagagaactcctatgcatcccttagaaccctgctcagac
accattacttttgtgaacgcttctgccacatcttgtcttccccaaaattgatcactccgccttctcctgggctcccgtagcacactataacatctgctg
gagtgttgctgttgcaccatactttcttgtacatttgtgtctcccttcccaactagactgtaagtgccttgcggtcagggactgaatcttgcccgtttat
gtatgctccatgtctagcccatcatcctgcttggagcaagtaggcaggagctcaataaatgtttgttgcatgaagaaaaaaaaaaaaaaaaaaaa
aaaaaaaaaaaaaaaaaaaaaaaaa

| | | |
|---|---|---|
| cytochrome | 57 | AL021683 |
| oxidase | | NM_005138 |
| deficient | | |
| homolog 2 | | |
| (SCO2) | | |
| SlamF8 | 58 | AK074669 |
| (BLAME) | | Sequence below. |

acttttgggacatcctgttctgagtcaagattcctccttctgaacatgggactttccagaaggaccacagctcctcccgtgcatccactcggcctg
ggaggttctggattttggctgtcgagggagtttgcctgcctctccagagaaagatggtcatgaggcccctgtggagtctgcttctctgggaagcc
ctacttcccattacagttactggtgcccaagtgctgagcaaagtcgggggctcggtgctgctggtggcagcgcgtccccctggcttccaagtcc
gtgaggctatctggcgatctctctggccttcagaagagctcctggccacgtttttccgaggctccctagagactctgtaccattcccgcttcctgg
gccgagcccagctacacagcaacctcagcctggagctcgggccgctggagtctggagacagcggcaacttctccgtgttgatggtggacac
aaggggccagccctggacccagaccctccagctcaaggtgtacgatgcagtgcccaggcccgtggtacaagtgttcattgctgtagaaaggg
atgctcagccctccaagacctgccaggttttcttgtcctgttgggcccccaacatcagcgaaataacctatagctggcgacgggagacaaccat
ggactttggtatggaaccacacagcctcttcacagacggacaggtgctgagcatttccctgggaccaggagacagagatgtggcctattcctg
cattgtctccaaccctgtcagctgggacttggccacagtcacgccctgggatagctgtcatcatgaggcagcaccagggaaggcctcctacaa
agatgtgctgctggtggtggtgcctgtctcgctgctcctgatgctggttactctcttctctgcctggcactggtgcccctgctcagggaaaaagaa
aaaggatgtccatgctgacagagtgggtccagagacagagaacccccttgtgcaggatctgccataaaggacaatatgaactgatgcctgga
ctatcagtaaccccactgcacaggcacacgatgctctgggacataactggtgcctggaaatcaccatggtcctcatatctcccatgggaatcctg
tcctgcctcgaaggagcagcctgggcagccatcacaccacgaggacaggaagcaccagcacgtttcacacctcccccttccctctcccatctt
ctcatatcctggctcttctctgggcaagatgagccaagcagaacattccatccaggacactggaagttctccaggatccagatccatggggaca
ttaatagtccaaggcattccctcccccaccactattcataaagtattaaccaactggcaccaaggaattgcctccagcctgagtcctaggctctaa
aagatattacatatttgaactaatagaggaactctgagtcacccatgccagcatcagcttcagccccagaccctgcagtttgagatctgatgcttc
ctgagggccaaggcattgctgtaagaaaaggtctagaaataggtgaaagtgagaggtgggggacaggggtttctctttctggcctaaggacttt
caggtaatcagagttcatgggccctcaaaggtagattgcagttgtagacaccgaggatggttgacaacccatggttgagatgggcaccgttttg
caggaaacaccatattaatagacatcctcaccatctccatccgctctcacgcctcctgcaggatctgggagtgagggtggagagtctttcctcac
gctccagcacagtggccaggaaaagaaatactgaatttgccccagccaacaggacgttcttgcacaacttcaagaaaagcagctcagctcag
gatgagtcttcctgcctgaaactgagagagtgaagaaccataaaacgctatgcagaaggaacattatggagagaaagggtactgaggcactct
agaatctgccacattcattttcaaatgcaaatgcagaagacttaccttagttcaaggggaggggacaaagaccccacagcccaacagcaggac
tgtagaggtcactctgactccatcaaactttttattgtggccatcttaggaaaatacattctgcccctgaatgattctgtctagaaaagctctggagta
ttgatcactactggaaaaacacttaaggagctaaacttaccttcggggattattagctgataaggttcacagtttctctcacccaggtgtaactgga
ttttttctggggcctcaatccagtcttgataacagcgaggaaagaggtattgaagaaacaggggtgggtttgaagtactattttcccagggtggct
tcaatctccccacctaggatgtcagccctgtccaaggaccttccctcttctccccagttcctgggcaatcacttcaccttggacaaaggatcagca
cagctggcctccagatccacatcaccactcttccactcgattgttcccagatcctccctgcctggcctgctcagaggttccctgttggtaacctgg
ctttatcaaattctcatccctttcccacacccacttctctcctatcaccttcccccaagattacctgaacagggtccatggccactcaacctgtcagct
tgcaccatccccacctgccacctacagtcaggccacatgcctggtcactgaatcatgcaaaactggcctcagtccctaaaaatgatgtggaaag
gaaagcccaggatctgacaatgagccctggtggatttgtggggaaaaaatacacagcactccccacctttctttcgttcatctccagggcccca
cctcagatcaaagcagctctggatgagatgggacctgcagctctccctccacaaggtgactcttagcaacctcatttcgacagtggtttgtagcg
tggtgcaccagggccttgttgaacagatccacactgctctaataaagttcccatccttaatgaag

| | | |
|---|---|---|
| SLIT2 | 59 | NM_004787, AB017168, AK027326 |
| Spondin 1, | 60 | NM_006108 |
| extracellular | | AB018305 |
| matrix protein | | AK074803 |
| (SPON1) | | BC041974 |
| sprouty | 61 | Sequence below. |
| homolog 4 | | |
| (SPRY4) | | |

gcgagctgagctgacagcgcggagctggcgctgtggagcgcagggagccttgccggttcctccgaccggcgtctgcgagtacagcggcg
gctaacctgccccggcttcaggatttacacagacgtggggcgatgcttgtgaccctgcagctcctcaaaccagcctgtattgagcggtttgcag
cctgatgctcagccccctccccacagggcccctagaagcctgtttctccgtacagtccaggacctccagccccatggagcccccgatcccaca
gagcgcccccttgactcccaactcagtcatggtccagccccttcttgacagccggatgtcccacagccggctccagcacccactcaccatcct
acccattgaccaggtgaagaccagccatgtggagaatgactacatagacaaccctagcctggccctgaccaccggcccaaagcggacccg
gggcggggccccagagctggccccgacgcccgcccgctgtgaccaggatgtcacccaccattggatctccttcagcgggcgccccagctct
gtgagcagcagcagcagcacatcctctgaccaacggctcttagaccacatggcaccaccacccgtggctgaccaggcctcaccaagggctg
tgcgcatccagcccaaggtggtccactgccagccgctggacctcaagggcccggcggtcccacccgagctggacaagcacttcttgctgtg
cgaggcctgtgggaagtgtaaatgcaaggagtgtgcatccccccggacgttgccttcctgctgggtctgcaaccaggagtgcctgtgctcagc
ccagactctggtcaactatggcacgtgcatgtgtttggtgcagggcatcttctaccactgcacgaatgaggacgatgagggctcctgcgctgac
cacccctgctcctgctcccgctccaactgctgcgcccgctggtccttcatgggtgctctctccgtggtgctgccctgcctgctctgctacctgcct
gccaccggctgcgtgaagctggcccagcgtggctacgaccgtctgcgccgccctggttgccgctgcaagcacacgaacagcgtcatctgca
aagcagccagcggggatgccaagaccagcaggcccgacaagcctttctgacagtttgtgtcgaagccccagtgctctgcctggaaacctggt
tctcttctgacatctaagaagactgcagcaaggtcagaggttttagcctcctgaggctgaccttgctagtctgcccactccctacccccagcttcg
gaaaatacagagaccaccaccacgtaccctgtattccccaaggtgatgaagaagcactttggggctttttttcagggtcctgaaactttgtgtcaa
acagacaatgcaggggcagggtgtggtttggggggaaatttttctttttcagaagacagaacacagatgtggacacatatccggaaactgcag
ctgcttgaatgccttcccagcccctccttctccctccctccctccgccccccccttcctcttttccattgtctttggctctcacaggagctagctgcct
gggaggaattgttaactgagtaccagggtacctttaaagaagacccttggagtcttctataccttcttctccttccccatctcactccaccccacttt
gtccctgatgtcttggggaaggtgtagaacaccctagcagttcctattgtatatacttgggagccactgagaacagaggacggccagtgagtcc
aagcctcgttcctccttctgcctccccggagccacaggatggatttaggagccactgctcagtgcacttctcccttccaactgcatcaactaactc
tcgggggtgttctgctcaccacaccgtccttcggttcttactgagtcacagactcgcctgcccactacgtgtcctgggttctctactcagatccctt
ccagaaactttatatgggtagaggaagccagggcggcaaatgcgagaccaaatatcattttgccaatgagtctgaggctgtggtctctggatcc
agtcattatgtttttatagaataattaaaccggatgctaacggtgttttaaaaaataataataaaacaacttgtttccttttggccacccccaggaagg
gctgatttcaaaatctgggggcgagcaacctcaaggaacacaatttccctccctatcaacaagaggattttaacagcaaagaagagaggcagc
acctcccattggcagaatgaccgctgagccaggctgggtttgggtttcttctcttctgattctgctgctcactgtcatagccttttgtgtatagtgatg
tgtctgtatctttaatgtaaatagagagatgatgaaaaaagagtctattttagtgttaggaagccccagcaggggagtcggaagagcttggaaga
gctggggagagggtaggggaaaggtttttccaggggccactgggtttgagccctgcttctgtgcacagccacaccaccctctcccgacagcc
ctcaaagacgtagcaactctttctctcaaggtgctaaaggactcagaaggtgcagcacgtccagtgggtaggtacttgttgcatgcaaaagctgt
agtgtatctggtccttcctccccagcttttgtgtggggttcttgctttgtgtggtattttgttttcccctctaatgagagggcatggcctgagtcagaag
agctaccccaggtgaaactggaagtgcatgaggcagagcgtccgtagcatttccagtttgttctgtataggacagaggtgcctccgggaagga
ggcagcgaggtaggtagctatgataggcacctaatgcttctcaaggacttattttttccttcttgaagactagtagtaacatcttatgatttagagtaa
gttgattgtaaccataggtatttattgattggaggaagggagggtcataattattttcggctttatttatgtaacatttgctagcttataaaaggcgaatgt
gaaatattgcatctgcattttccaaggctgattcgtgtagctacccttgccacagttgtgacggatgtatggatgttcttgaacatttcagaaggagt
ggtagaaaaaaacacacattcagccaaccacttataigaattgaatgtatcagaagtgtactgaagggactggagatggttttcctcagatgagg
gggccccaaaattgatagtgcacatctgcacgctttctgcgaggcctcagaacttttcccagggcccctccctcaaattgtctccatgggaaactt
gacccagtggcaagttgcactttggtgatcttggtggtctacacacccgttctgtggagagtcgatttacataagctgtgtatacacacacacaca
cacacacacacacacacacacacacacccctaccccacactgactgtctaccgacagagaccctatttcctggcaaacggcctcctgaaccct
gactttttgtgtacatacttgtaaacacggatttttctgggttttggtttgctttttccttttttccccctgcccctgttctagcttgttcttcttggtttgc
tttcaacctgcttgatggatgtctgcagagtgctctctaagagtccacctcagtgcctcgtgtgctcagtggtcatgggaaggagcgaaggaaccatc
cttggttctcccagcttggttgtgtagcaatccctcagcattgtttttctcagcttcttggcaaaaattaaaacaacaacaacaacaacaacaacaac
aacaaacagaaggataaactggcttgcctgtggaccctccccggctctggggccagtcgagagccactgagggacccagcactcagagac
acaacacacatgtgtagctgcttctggctgagtgtgtttcctgtcaccaatggcctgtttggctggacgatgcctcggcttgaccttttttgaaaagt
gctggttagttcccgccccctggtaaacctggggtaggtgggggttctgtcttaactcgaggggcacctgggatccaggacgcttctaggggg
ctctggctgcccgtgttaatgaaggacagcgcttccgcgagcaccctgggaactgggtcttgggtagcaaagccctcccagagaaaagatgg
gcacaactaaggctttcctgagcaggaagggggtgaagaccaatcccttcctttggtcctttggtacgcaccccctcagagctgagatggaag
acatggctagttcttttcagccttgtggagcctgtcagtcgccatcatacctcgagtgaggcccagctagataatgacttgtccaagatggcacac
gtggaaagttgatctgcaccagaacccggatgactgtcaccttgaagcgtcctgttctccttctgtgctgtcccaggaagtgtctggcgggcgtg
ggcagcacagctctacactgtacgattcactagggcatcctgcgagcctcactagccttctggttcatgcctttgacaagcatttttgtgccccctc
tgcttactgtgacagtcgatgatgaatcttgcgttgccattttctgctgtgggtaactgcgtgcagtgtcttgccttgctttctcttcttactgtgggaca
gcttggtttcatgttacaaacagaaaagctcgaggctcccaccccgccacatcccaacttcatttccccctcactgtagcccatttccaccccacc
acaaagttgccacaggttttctttgtatagaatatttattttgaagctctattttaatagtatttattttagaaagtctactattgtaagagttcttctgttt
gtgaagaaaaaaacaagttaaaaactgaatgtactgatttagaaaatatatataaatatatattgttaaatataaa

| | | |
|---|---|---|
| Stanniocalcin 2 | 62 | BC000658, BC006352, BC013958, AF055460, AB012664, |
| (STC2) | | AK027390, AK075406, AK095891 |
| Stress 70 | 63 | BC036370 |
| protein | | NM_006948 |
| chaperone, | | BC017580 |
| microsome- | | AK128540 |
| associated, | | |
| 60 kDa (STCH) | | |
| Tumor- | 64 | BC014785, AK026585 NM_002354, M26481, M32306, |
| associated | | M32325, M33011, X14758 |
| calcium signal | | |
| transducer 1 | | |
| (TACSTD1) | | |
| Threonyl-tRNA | 65 | BC088355 |
| synthetase | | Sequence below. |
| (TARS) | | |

cccacgcgtccgccacctcccacccgcctcttggctcctctcctctaggccgtcgctttcgggttctctcatcgcttcgtcgttcgccaatgtttga
ggagaaggccagcagtccttcagggaagatgggaggcgaggagaagccgattggtgctggtgaagagaagcaaaaggaaggaggcaaa
aagaagaacaaagaaggatctggagatggaggtcgagctgagttgaatccttggcctgaatatatttacacacgtcttgagatgtataatatact
aaaagcagaacatgattccattctggcagaaaaggcagaaaaagatagcaagccaattaaagtcactttgcctgatggtaaacaggttgatgcg
gaatcttggaaaactacaccatatcaaattgcctgtggaattagtcaaggcctggccgacaacaccgttattgctaaagtaaataatgttgtgtgg
gacctggaccgccctctggaagaagattgtaccttggagcttctcaagtttgaggatgaggaagctcaggcagtgtattggcactctagtgctca
cataatgggtgaagccatggaaagagtctatggtggatgtttatgctacggtccgccaatagaaaatggattctattatgacatgtacctcgaaga
agggggtgtgtctagcaatgatttctcttctctggaggctttgtgtaagaaaatcattaaagaaaaacaagcttttgaaagactggaagttaagaaa
gaaactttactggcaatgtttaagtacaacaagttcaaatgccggatattgaatgaaaaggtgaatactccaactaccacagtctatagatgtggc
cctttgatagatctctgccggggtcctcatgttagacacacgggcaaaattaaggctttaaaaatacacaaaaattcctccacgtactgggaagg
caaagcagatatggagactctccagagaatttatggcatttcattcccagatcctaaaatgttgaaagagtgggagaagttccaagaggaagcta
aaaaccgagatcataggaaaattggcagggaccaagaactatatttctttcatgaactcagccctggaagttgcttttttctgccaaaaggagcct
acatttataatgcacttattgaattcattaggagcgaatataggaaaagaggattccaggaggtagtcaccccaaacatcttcaacagccgactct
ggatgacctcgggccactggcagcactacagcgagaacatgttctcctttgaggtggagaaggagctgtttgccctgaaacccatgaactgcc
caggacactgccttatgtttgatcatcggccaaggtcctggcgagaactgcctctgcggctagctgattttggggtacttcataggaacgagctg
tctggagcactcacaggactcacccgggtacgaagattccaacaggatgatgctcacatattctgtgccatggagcagattgaagatgaaataa
aaggttgtttggattttctacgtacggtatatagcgtatttggattttcttttaaactaaacctttctactcgcccagaaaaattccttggagatatcgaa
gtatgggatcaagctgagaaacaacttgaaaacagtctgaatgaatttggtgaaaagtgggagttaaactctggagatggagctttctatggccc
aaagattgacatacagattaaagatgcgattgggcggtaccaccagtgtgcaaccatccagctggatttccagttgcccatcagatttaatcttac
ttatgtaagccatgatggtgatgataagaaaaggccagtgattgttcatcgagccatcttgggatcagtggaaagaatgattgctatcctcacaga
aaactatgggggcaaatggcccttttggctgtcccctcgccaggtaatggtagttccagtgggaccaacctgtgatgaatatgcccaaaaggta
cgacaacaattccacgatgccaaattcatggcagacattgatctggatccaggctgtacattgaataaaaagattcgaaatgcacagttagcaca
gtataacttcattttagttgttggtgaaaaaaaaaaaaaaa

| | | |
|---|---|---|
| T-box 2 | 66 | BC052566, NM_005994, BC070054, AB209378, |
| (TBX2) | | AK127429, U28049 |
| Thy-1 cell | 67 | NM_006288, AF261093, BC005175, AK057865, |
| surface antigen | | AK090996, AK094374 |
| (THY1) | | |
| Tumor necrosis | 68 | BC030205 |
| factor, alpha- | | NM_007115 |
| induced protein | | M31165 |
| 6 (TNFAIP6) | | Sequence below. |

cagtcacatttcagccactgctctgagaatttgtgagcagcccctaacaggctgttacttcactacaactgacgatatgatcatcttaatttacttattt
ctcttgctatgggaagacactcaaggatggggattcaaggatggaatttttcataactccatatggcttgaacgagcagccggtgtgtaccacag
agaagcacggtctggcaaatacaagctcacctacgcagaagctaaggcggtgtgtgaatttgaaggcggccatctcgcaacttacaagcagc
tagaggcagccagaaaaattggatttcatgtctgtgctgctggatggatggctaagggcagagttggataccccattgtgaagccagggccca
actgtggatttggaaaaactggcattattgattatggaatccgtctcaataggagtgaaagatgggatgcctattgctacaacccacacgcaaag
gagtgtggtggcgtctttacagatccaaagcaaatttttaaatctccaggcttcccaaatgagtacgaagataaccaaatctgctactggcacatta
gactcaagtatggtcagcgtattcacctgagttttttagattttgaccttgaagatgacccaggttgcttggctgattatgttgaaatatatgacagtta
cgatgatgtccatggctttgtgggaagatactgtggagatgagcttccagatgacatcatcagtacaggaaatgtcatgaccttgaagtttctaag
tgatgcttcagtgacagctggaggtttccaaatcaaatatgttgcaatggatcctgtatccaaatccagtcaaggaaaaaatacaagtactacttct
actggaaataaaaactttttagctggaagatttagccacttataaaaaaaaaaaaaaggatgatcaaaacacacagtgtttatgttggaatcttttgg
aactcctttgatctcactgttattattaacatttatttattatttttctaaatgtgaaagcaatacataatttagggaaaattggaaaatataggaaacttta
aacgagaaaatgaaacctctcataatcccactgcatagaaataacaagcgttaacattttcatatttttttctttcagtcatttttctatttgtggtatatgt
atatatgtacctatatgtatttgcatttgaaattttggaatcctgctctatgtacagttttgtattatacttttaaatcttgaactttataaacattttctga
aatcattgattattctacaaaaacatgattttaaacagctgtaaaatattctatgatatgaatgttttatgcattatttaagcctgtctctattgttggaatt
tcaggtcattttcataaatattgttgcaataaatatccttgaacacaaaaaaaaaaaaaaaaaa

| | | |
|---|---|---|
| Tumor necrosis | 69 | BC010241, BC017730, NM_014452, AY358304, |
| factor receptor | | BC005192, BC015466, AB209394, AJ420531 |
| superfamily, | | Sequence below. |
| member 21 | | |
| (TNFRSF21) | | |
| (DR6) | | |

gccaccttgtctgtgagctccctgtgccccccatacggtgtgtcctgtgggttggggtgtgcggaagaaagggacagagactgaggatgtgcg
gtgtaagcagtgtgctcggggtaccttctcagatgtgccttctagtgtgatgaaatgcaaagcatacacagactgtctgagtcagaacctggtgg
tgatcaagccggggaccaaggagacagacaacgtctgtggcacactcccgtccttctccagctccacctcaccttcccctggcacagccatctt
tccacgccctgagcacatggaaacccatgaagtcccttcctccacttatgttcccaaaggcatgaactcaacagaatccaactcttctgcctctgt
tagaccaaaggtactgagtagcatccaggaagggacagtccctgacaacacaagctcagcaagggggaaggaagacgtgaacaagaccct
cccaaaccttcaggtagtcaaccaccagcaaggcccccaccacagacacatcctgaagctgctgccgtccatggaggccactgggggcga
gaagtccagcacgcccatcaagggccccaagaggggacatcctagacagaacctacacaagcattttgacatcaatgagcatttgccctggat
gattgtgcttttcctgctgctggtgcttgtggtgattgtggtgtgcagtatccggaaaagctcgaggactctgaaaaaggggccccggcaggatc
ccagtgccattgtggaaaaggcagggctgaagaaatccatgactccaacccagaaccgggagaaatggatctactactgcaatggccatggt
atcgatatcctgaagcttgtagcagcccaagtgggaagccagtggaaagatatctatcagtttctttgcaatgccagtgagagggaggttgctgc
tttctccaatgggtacacagccgaccacgagcgggcctacgcagctctgcagcactggaccatccggggccccgaggccagcctcgccca
gctaattagcgccctgcgccagcaccggagaaacgatgttgtggagaagattcgtgggctgatggaagacaccacccagctggaaactgac
aaactagctctcccgatgagccccagcccgcttagcccgagccccatccccagccccaacgcgaaacttgagaattccgctctcctgacggt
ggagccttccccacaggacaagaacaagggcttcttcgtggatgagtcggagccccttctccgctgtgactctacatccagcggctcctccgc
gctgagcaggaacggttcctttattaccaaagaaaagaaggacacagtgttgcggcaggtacgcctggacccctgtgacttgcagcctatcttt
gatgacatgctccactttctaaatcctgaggagctgcgggtgattgaagagattccccaggctgaggacaaactagaccggctattcgaaattat
tggagtcaagagccaggaagccagccagaccctcctggactctgtttatagccatcttcctgacctgctgtagaacatagggatactgcattctg
gaaattactcaatttagtggcagggtggttttttaattttcttctgtttctgatttttgttgtttggggtgtgtgtgtgtgtttgtgtgtgtgtgtgtgtgtg
tgtgtgtgtgtgtttaacagagaatatggccagtgcttgagttctttctccttctctctctctcttttttttttaaataactcttctgggaagttggtttata
agcctttgccaggtgtaactgttgtgaaatacccaccactaaagttttttaagttccatattttctccattttgccttcttatgtattttcaagattattctg
tgcactttaaatttacttaacttaccataaatgcagtgtgacttttcccacacactggattgtgaggctcttaacttcttaaaagtataatggcatcttgtga
atcctataagcagtctttatgtctcttaacattcacacctactttttaaaaacaaatattattactatttttattattgtttgtcctttataaattttcttaa
agattaagaaaatttaagaccccattgagttactgtaatgcaattcaactttgagttatcttttaaatatgtcttgtatagttcatattcatggctgaaactt
gaccacactattgctgattgtatggttttcacctggacaccgtgtagaatgcttgattacttgtactcttcttatgctaatatgctctgggctggagaaatga
aatcctcaagccatcaggatttgctatttaagtggcttgacaactgggccaccaaagaacttgaacttcaccttttaggatttgagctgttctggaac
acattgctgcactttggaaagtcaaaatcaagtgccagtggcgccctttccatagagaatttgcccagctttgctttaaaagatgtcttgttttttatat
acacataatcaataggtccaatctgctctcaaggccttggtcctggtgggattccttcaccaattactttaattaaaaatggctgcaactgtaagaac
ccttgtctgatatatttgcaactatgctcccatttacaaatgtaccttctaatgctcagttgccaggttccaatgcaaaggtggcgtggactccctttg
tgtgggtggggtttgtgggtagtggtgaaggaccgatatcagaaaaatgccttcaagtgtactaatttattaataaacattaggtgtttgttaaaaaa
aaaaaaaaa

| | | |
|---|---|---|
| Uridine | 70 | BC001405, BC047030, BC053592, X90858 |
| phosphorylase 1 | | |
| (UPP1) | | |

### Example 3

### Further Validation of TVM

[0375] To test the specificity of identified genes to tumors relative to normal tissues, previously uninvestigated genes were selected from the above candidates for further validation. As positive controls for our assays, known TVM were included. First, 12 selected TVM were tested for enrichment of expression in ovarian tumors versus normal ovarian tissue, by analyzing their whole tissue expression by qRT-PCR in an independent set of stage-III ovarian cancers (n=20) and normal ovaries (n=5). All 12 TVM tested were upregulated in cancer tissue versus normal ovaries (p<0.05 for all). Many TVM were expressed at or below the lowest limits of detection in normal ovaries (FIG. 3A). TVM expression in normal tissues was also examined by analyzing pre-existing SAGE data (Boon K et al, An anatomy of normal and malignant gene expression. Proc Natl Acad Sci USA 2002 Aug. 20; 99(17):11287-92.) (FIG. 3E). Genes exhibiting no or minimal in silico expression in normal tissues were then screened in a panel of normal tissues with qRT-PCR (FIG. 3B). All TVM tested, except for C11orf8 and FJX1, were highly expressed in tumors and were expressed at or below the lowest limits of detection in normal tissues tested. C11orf8 was significantly enriched in TVC relative to all cell types tested, and was expressed at or below the lowest limit of detection in all cell types except brain and spleen. FJX1 was significantly enriched in TVC relative to all cell types tested except for spleen.

[0376] Quantitative Real-time Polymerase Chain Reaction (qRT-PCR) was used to evaluate the expression of select TVM in different malignancies, including lung cancer, mesothelioma, breast cancer and melanoma (FIG. 3C). To ensure expression differences were not due to differences in vascular density, the qRT-PCR data were normalized against CD31 expression, a reliable marker of endothelial cells. Collagen 11α1 was expressed at even higher levels in breast and lung relative to ovarian tumors, LZTS1 was relatively specific for melanoma and ovarian cancer, and FZD10 and EMBPL1 was relatively specific for ovarian tumors. Other TVM exhibited quantitative differences in expression among different tumor types, indicating that, under the conditions utilized, TVC signatures differ among tumor types.

[0377] In addition, TVM that exhibited minimal expression in normal tissues were evaluated for expression in tissues with physiologic angiogenesis including corpus luteum, proliferative endometrium and placenta. Data were normalized against CD31 expression. Some of the TVM (adlican, collagen 11α1, F2RL1, GPM6B and STC2) were expressed at 40-350 fold higher levels in tumor versus tissues with physiologic angiogenesis (FIG. 3D). However, EGFL6, OLFML2B and previously established TVM such as TEM-1 and TEM-7 were expressed in reproductive tissues with physiologic angiogenesis.

[0378] These findings further validated the identified proteins and transcripts as TVM. Expression of the TVM in other tumors besides ovarian cancer show that their utility (e.g. in tumor localization and diagnostic and therapeutic methods) is not limited to ovarian tumors, but rather includes many other solid tumors. In addition, these findings validated the methods used in the present invention for identifying TVM, with regard to both those TVM tested in vivo and those not yet tested in vivo.

### Example 4

### Localization of TVM Expression to Tumor Vasculature

[0379] To confirm that genes identified through immuno-LCM and transcriptional profiling were localized to ovarian cancer tumor vasculature, immunohistochemistry (IHC) was performed. Both CD24 (FIG. 4) and CD74, normally expressed by hematopoietic cells of the monocytic/macrophage lineage, but also reported as expressed in endothelium, were clearly expressed in ovarian tumor vessels. Endothelial lipase and FolH1, genes previously identified as expressed in tumor vasculature, were also expressed in ovarian tumor endothelium. SPON-1 was also found to be expressed in a vascular pattern. PAR2 (F2RL1) was localized primarily in peri-endothelial location, while STC2 co-localized with CD31 expression. AML-1 was expressed in stromal cells, but also in vascular structures by IHC (FIG. 4, second row). In addition, AML-1 expression was only detected in small tumor vessels, but was absent in large, smooth muscle actin-positive, mature vessels. Double immunofluorescence indicated that AML-1 co-localized with CD31 expression (FIG. 4, last row); localization in adjacent cells could not be excluded, however.

[0380] For TVM against which antibodies were unavailable, expression in tumor vasculature was confirmed using in-situ hybridization (ISH). ISH revealed clear expression of GPM6B, adlican, TNFαIP6, FZD10, EGFL6, DR6 and FJX1 in 5 independent ovarian cancer samples (FIG. 5). TVM were detected in vascular structures and were absent in tumor cells. Expression was generally limited to small neo-vascular structures, and with the exception of FZD10, was absent in large, muscular vessels. With the exception of FJX1, which was detected at very low levels in normal ovarian vasculature, TVM were not detected in 3 independent normal ovary specimens. No specific staining was observed with sense strand RNA controls, showing that the signals observed accurately reflected expression of the RNA molecules measured. Pre-treatment of slides with RNAse prior to probe hybridization eliminated all specific staining for all TVM tested, providing an additional control for veracity of the data.

[0381] These findings confirm that the identified TVM were expressed in tumor vasculature.

### Example 5

### TVM Expression in Different TVC

[0382] To test which cells in the tumor vasculature express the identified TVM, mRNA expression was evaluated by qRT-PCR in VE-cadherin⁺ CD146⁺ CD45⁻ tumor endothelial cells (TEC) isolated freshly by FACS from ovarian cancer specimens. TVM expression in VE-cadherin⁺ CD146⁺ CD45⁺ vascular leukocytes (VLC); myeloid cells with vasculogenic potential; and control peripheral blood mononuclear cells (PBMC) was also tested. All TVM were expressed by VLC, and all except AML-1 were expressed by purified TEC (FIG. 6). Adlican, EGFL6, FJX1, FZD10, GPM6B and SPON-1 were expressed at approximately 10-fold higher levels in TEC than VLC. TEC expressed these genes at greater than 100-fold higher levels than PBMC. BCM-like membrane protein precursor (BLAME) was higher in VLC (and PBMC) than TEC, and TNFαIP6 was higher in TEC and VLC than PBMC. AML-1 demonstrated highest expression in PBMC and intermediate in VLC, while it was nearly absent in TEC. Thus, genes identified through immuno-LCM and transcriptional profiling are expressed by TVC, at different levels in TEC and VLC.

[0383] Thus, expression of most TVM tested in tumor endothelial cells provided still further evidence that the TVM identified were genuine, and that cell contamination did not occur during immuno-LCM.

### Example 6

### Dendritic Cell Precursors Upregulate TVM Under the Influence of VEGF-A

[0384] To address the origin of human VLC, DC were generated from human PBMC with GM-CSF and IL-4 (Benencia F et al, HSV oncolytic therapy upregulates interferon-inducible chemokines and recruits immune effector cells in ovarian cancer. Mol. Ther. 2005 November; 12(5):789-802). FACS analysis demonstrated 100% CD45 expression in these cells (FIG. 7A, top left). DC were then labeled with CFSE and treated with recombinant human (rh)VEGF₁₆₅ for 7 days. VEGF₁₆₅ induced significant up-regulation of VE-cadherin in a population of PBMC-derived DC (FIG. 7A, top right). The monocyte fraction of PBMC was primarily responsible for giving rise to the VE-cadherin⁺CD45⁺ population upon treatment with VEGF₁₆₅ (FIG. 7A, middle). Lack of CFSE dye dilution with VEGF-A treatment indicated that the phenotype switch was not due to expansion of endothelial progenitor contaminants (FIG. 7A, bottom). In addition, endothelial progenitor assays performed with these cells demonstrated no proliferation. Thus, under the conditions utilized, VEGF-A induces monocyte-derived DC to acquire VLC features.

[0385] To test whether VEGF₁₆₅ treatment induced TVM in human PBMC-derived DC, expression of collagen 11α1, DR6, FZD10, GPM6B, SCP1, SPON-1, and TEM-1 was measured, following VEGF₁₆₅ treatment. All these transcripts were markedly up-regulated, and VEGF-neutralizing antibody abrogated their up-regulation (FIG. 7B). Expression of AML-1 and LZTS1 were down-regulated in DC by VEGF₁₆₅. This down-regulation was abrogated by anti-VEGF-A antibody in 3-day cultures but not after 2 weeks of VEGF₁₆₅ treatment. Other TVM, such as adlican and SLIT2, were not up-regulated in DC by VEGF₁₆₅ treatment, showing that, under the conditions utilized, other mediators besides VEGF-A were necessary to complete the full differentiation of these cells into VLC.

### Example 7

### DC Precursors Contribute to Tumor Vasculature and Express a Larger Repertoire of TVM In Vivo

[0386] To determine whether additional TVC could be contributed by DC in vivo, human PBMC-derived DC were treated with rhVEGF₁₆₅ for one week in vitro, admixed with 2008 human ovarian cancer cells (1:10; DC, tumor cell) and transplanted within Matrigel® into NOD/SCID/β2M−/− recipient mice. As controls, 2008 cells were injected alone, or co-injected together with FACS-isolated TEC or VLC in the opposite side. Tumors were assessed for expression of TVM 3 weeks later using qRT-PCR. Three TVM, adlican, FJX1 and STC2, as well as known TVM, SLIT2 and TEM-1, were clearly detected in tumor xenografts enriched with human VEGF-treated DC, VLC or TEC, while they were not detected in tumors generated with tumor cells alone (FIG. 7C). Immunofluorescence analysis to identify human endothelium using antibodies specific to human (h)CD34 and hCD31 identified small clusters of human vascular structures in tumors enriched with rhVEGF-treated DC, VLC or TEC (FIG. 7D). No staining for human endothelium was identified when 2008 cells were injected alone. These cells exhibited markers and in vivo behavior that were similar to tumor-derived VLC, showing that certain tumor VLC derive from myeloid DC.

[0387] Induction of TVM by VEGF-A in vitro was not due to expansion of contaminating endothelial precursor cells, as shown by negative CFSE dilution and endothelial progenitor cell assays. When VEGF-treated DC were exposed to the tumor microenvironment in vivo, additional TVM could be induced, showing that, under the conditions utilized, in vivo factors further contribute to acquisition of a VLC phenotype by DC. Importantly, tumors enriched with VEGF-treated DC exhibited vascular structures expressing human CD31 and CD34, while control tumors generated with only tumor cells did not. Thus, tumor cells were not responsible for the expression of TVM in vivo.

[0388] Thus, human VEGF-primed monocyte-derived DC can give rise to vascular cells in tumors. These findings demonstrate that many of the novel TVM identified are expressed by vascular cells of myeloid lineage.

### Example 8

### Identification of Additional Transmembrane and Secreted TVM

[0389] The tumor vasculature-specific genes identified in Example 2 were further analyzed by t-statistics, ranked and nonparametric analyses, and Genespring®. Over 200 genes were identified that were either exclusively expressed in tumor ECs or significantly overexpressed in tumor ECs and absent in 75% of normal ECs. From among these genes, transcripts were then identified that encoded proteins that were transmembrane or secreted, based on known structure or sequence analysis. The 108 transcripts identified are listed and described in FIG. 8. GenBank Accession Numbers of the new plasma membrane-associated, (“PM”), transmembrane (TM), extracellular matrix (ECM), and secreted TVM (those that do not appear in Table 6) are set forth in Table 7.

TABLE 7
Sequences of the new transmembrane and secreted TVM. Each
GenBank Accession No. represents a separate embodiment
of the present invention.

| | Localization; | |
|---|---|---|
| | SEQ ID | |
| Gene name | Number | Exemplary GenBank Accession Numbers |
| IBSP (Integrin-binding | Secreted; 89 | NM_004967, J05213, NP_004958 |
| sialoprotein) | | |
| FAD104 (FNDC3B; | TM; 90 | NM_022763, BC033635, AK127826, |
| Fibronectin type III domain | | AL157482, BC039297, BC012204, |
| containing 3B) | | AF543840, AY358146, AY358367, |
| | | AK027052, AK075220, AB098597, |
| | | AK223599, AL157482 |
| WARP (Von Willebrand | TM; 91 | AK096773, 30349211, NM_199121, |
| factor A domain containing | | BC059409, NM_022834, AK025868 |
| 1) | | |
| B-cell receptor-associated | ER/TM; 92 | NM_018844, AF126020, |
| protein 29 (BCAP29) | | NM_001008405, NM_001008406, |
| | | NM_001008407, BC008478, |
| | | AF126020, BT006981. |
| CDH1 (Cadherin 1, type 1, | TM; 93 | NM_004360, Z13009, L08599, |
| E-cadherin (epithelial) | | AB025105, AB025106, X12790, |
| | | X52279, Z18923. |
| FLJ10826 (OGFOD1; 2- | TM; 94 | NM_018233, AK024314, BC032919, |
| oxoglutarate and iron- | | NM_001031707, BC032919, |
| dependent oxygenase | | AK001688, AB046832, AK022130, |
| domain containing 1) | | AK022752 |
| OPN3 (Opsin 3; | TM; 95 | AK000933, BC036773, |
| encephalopsin, panopsin) | | NM_001030011, NM_001030012, |
| | | NM_014322, AF140242, BC036773, |
| | | BC062622, BC073872, AF303588 |
| HIATL2 (Hippocampus | TM; 96 | BC005058, NM_032318, XM_939817 |
| abundant gene transcript- | | |
| like 2) | | |
| IL28RA (Interleukin 28 | TM; 97 | NM_170743, NM_173064, |
| receptor, alpha; interferon, | | NM_173065, AF439325, AK160364, |
| lambda receptor) | | BC101408, BC101975, AY129151, |
| | | AY129152, AY129153, AK160364, |
| | | AF439325, AJ534330, AJ534331 |
| TMEM19 (Transmembrane | TM; 98 | BC008596, NM_018279, BC008596, |
| protein 19) | | AK001798, AK223148 |
| C10orf69 (SPFH domain | PM; 99 | BC031791, NM_006459, AK127017, |
| family, member 1) | | AF064093, AK222480 |
| FRAP1 (FK506 binding | PM; 100 | NM_004958, AB209995, L34075, |
| protein 12-rapamycin | | L35478 |
| associated protein 1) | | |
| CKLFSF6 (CKLF-like | TM/ | BC002797, AK000403, NM_017801, |
| MARVEL transmembrane | Secreted; 101 | AF116694, BC027472, AF479261, |
| domain containing 6) | | CR457231 |
| MPHOSPH9 (M-phase | PM/Golgi | X98258, NM_022782, AK023016, |
| phosphoprotein 9) | stacks; 102 | NP_073619 |
| CLST11240 (HIGD1B; | TM; 103 | BC020667, NM_016438, NM_004247, |
| HIG1 domain family, | | BC002360, D21163, AB038021, |
| member 1B) | | AB038022, AJ505017, CR456774 |
| MS4A6A (Membrane- | TM; 104 | BC022854, AF237908, AF253977, |
| spanning 4-domains, | | AF261136, AF286866, AF350502, |
| subfamily A, member 6A) | | AB013104, AF212240, BC108728, |
| | | NM_022349, NM_152851, NM_152852 |
| SGPP2 (Sphingosine-1- | TM; 105 | BC047944, NM_152386, BC106904, |
| phosphate phosphatase 2) | | BC106905, AF542512, AK096323, |
| | | XM_938742 |
| SLC11A1 (Solute carrier | TM; 106 | BC071165, L32185, NM_000578, |
| family 11; proton-coupled | | NM_001032220, BC041787, D38171, |
| divalent metal ion | | D50402, D50403, AB209650 |
| transporters, member 1) | | |
| SLCO3A1 (Solute carrier | TM; 107 | AF205074, NM_013272, AB031050, |
| organic anion transporter | | AK057031, BC000585, AF187816, |
| family, member 3A1) | | BC000585, XM_941061, XM_944958, |
| | | XM_944959 |
| LOC51136 (PTD016 | TM; 108 | BC006971, BC088365, NM_016125, |
| protein) | | AK098649, AF100745, NP_057209 |
| HAPLN1 (Hyaluronan and | ECM; 109 | BC057808, NM_001884, U43328, |
| proteoglycan link protein 1) | | BC057808, X17405 |
| DKFZp564I1922 (MXRA5 | PM; 110 | AK129884, AK130102, NM_000175, |
| (Matrix-remodelling | | NM_015419, K03515, AF245505, |
| associated 5) | | BC004982, BC006342, BC011846, |
| | | BC064986, BC080586, AL049946 |
| KCNE3 (Potassium | TM; 111 | NM_005472, BC113743, BC110612, |
| voltage-gated channel, Isk- | | AF076531, AF302494, DQ192291, |
| related family, member 3) | | DQ192292, CR457209, CR936625 |
| CALM3 (Calmodulin 3; | PM/ | BC005137, BC006182, AL050207, |
| phosphorylase kinase, | cytoplasm; | NM_005184, AK094964, J04046, |
| delta) | 112 | BT006855 |
| KCNE4 (Potassium | TM; 113 | BC014429, NM_080671, AY065987, |
| voltage-gated channel, Isk- | | DQ192293 |
| related family, member 4) | | |
| MGC34647 | TM; 114 | BC029804, NM_152456, AK172744, |
| | | BC029804 |
| MUC1 (Mucin 1, | TM; 115 | NM_001018016, NM_001018017, |
| transmembrane) | | NM_001018021, J05581, NM_002456, |
| | | M34088, M34089, M31823, M32738, |
| | | M32739, M26316, J05582, M21868, |
| | | U60259, U60260, U60261, S81736, |
| | | AY327582-AY327600, AY466157, |
| | | Z17324, Z17325 |
| SDC1 (Syndecan 1) | TM; 116 | NM_001006946, NM_002997, |
| | | AJ551176, BC008765, J05392, |
| | | BC008765, AK222739, X60306 |
| SLC30A6 (Solute carrier | PM; 117 | AL832755, BC032525, BC066903, |
| family 30 (zinc | | NM_017964, BC066903, AK055663 |
| transporter), member 6) | | |
| ST14 (Suppression of | TM; 118 | BC030532, NM_021978, AB030036, |
| tumorigenicity 14 (colon | | AF057145, AF118224, BC005826, |
| carcinoma)) | | BC018146, |
| CDCP1 (CUB domain | TM; 119 | AK026329, NM_022842, NM_178181, |
| containing protein 1) | | BC021099, BC069254, AY026461, |
| | | AF468010, AY167484 |
| LOC116238 (TLCD1) | TM; 120 | BC014072, NM_138463 |
| WFDC2 (WAP four- | Secreted; 121 | BC046106, NM_006103, BC039816, |
| disulfide core domain 2) | | X63187, NM_080733, AF330259, |
| | | NM_080734, NM_080736, AF330260 |
| SPTB; Spectrin, beta, | PM/ | NM_000347, X59511, |
| erythrocytic (includes | cytoskeleton; | NM_001024858, M37885, J05500, |
| spherocytosis, clinical type | 122 | AF465439, X59510, X59511, |
| I) | | BX248270 |
| FNDC3 (Fibronectin type | TM; 123 | NM_014923, BC060816, BC070072, |
| III domain containing 3A) | | BX648706, AK001140, AJ749706, |
| | | AJ749707 |
| SPRY1 (Sprouty homolog | Cytoplasm/ | BC063856, NM_005841, NM_199327, |
| 1, antagonist of FGF | lamelli- | AF041037, AK026960, AY590694 |
| signaling (Drosophila) | podium | |
| | membrane; | |
| | 124 | |
| MME (Membrane metallo- | TM; 125 | AL833459, NM_000902, NM_007287, |
| endopeptidase; neutral | | NM_007288, NM_007289, J03779, |
| endopeptidase, | | BC106070, BC101632, BC101658 |
| enkephalinase, CALLA, | | |
| CD10) | | |
| TOMM22 (Translocase of | mitochondrial | BC009363, NM_020243, AK024731, |
| outer mitochondrial | outer | AB041906 |
| membrane 22 homolog | membrane; | |
| (yeast)) | 126 | |
| SPP1 (Secreted | Secreted; 127 | BC007016, BC017387, BC022844, |
| phosphoprotein 1 | | BC093033, NM_000582, AF052124, |
| (osteopontin, bone | | BX648003, AK057738, AK075463, |
| sialoprotein I, early T- | | J04765, X13694, D28759, D28760, |
| lymphocyte activation 1) | | D28761, M83248 |
| INSR (Insulin receptor) | TM; 128 | BC117172, AL365454, NM_000208, |
| | | M10051, M24555, BC047591, |
| | | AB208861, X02160, NP_000199 |
| LPPR4 (Plasticity related | TM; 129 | NM_014839, AF357013, AF541281, |
| gene 1) | | BC042963, AY304518, AB007924, |
| | | AL834390 |
| C14orf100 | TM; 130 | BC005198, BC010359, NM_016475, |
| | | AF212245, AF529304, AK021683, |
| | | AK056145, AK128628 |
| SLC9A5 (Solute carrier | TM; 131 | NM_004594, AF111173, AL137689, |
| family 9 (sodium/hydrogen | | AB209203, NP_004585 |
| exchanger), member 5 | | |
| SCGB2A1 (Secretoglobin, | TM; 132 | BC062218, AJ224173, NM_002407, |
| family 2A, member 1) | | AF071219, BC062218 |
| FLT1 (Fms-related | Secreted/ | BC039007, NM_002019, S77812, |
| tyrosine kinase 1 (vascular | PM; 133 | S77814, AF063657, U01134, |
| endothelial growth | | BC039007, AB209050 |
| factor/vascular permeability | | |
| factor receptor) | | |
| C2orf6 (MOBK1B; MOB1, | TM; 134 | NM_018221, AK001650, AK023321, |
| Mps One Binder kinase | | BC003398, AK021657, AB016839, |
| activator-like 1B) | | AJ577474 |
| TMEM2 (Transmembrane | TM; 135 | BC044850, AB037833, NM_013390, |
| protein 2) | | AF137030, AK075370 |
| ACTR3 (ARP3 actin- | Arp2/3 | BC044590, NM_005721, AF006083 |
| related protein 3 homolog | protein | |
| (yeast)) | complex*; | |
| | 136 | |
| TMEM8 (Transmembrane | TM; 137 | BC021557, NM_021259, AB045292, |
| protein 8; five membrane- | | AK024725, AK091823, |
| spanning domains) | | |
| SLC5A4 (Solute carrier | TM; 138 | NM_014227, AJ133127, U41897 |
| family 5 (low affinity | | |
| glucose cotransporter), | | |
| member 4) | | |
| MEST (Mesoderm specific | TM; 139 | BC002413, BC011908, BC014564, |
| transcript homolog (mouse) | | BC018695, BC090049, NM_002402, |
| | | NM_177524, NM_177525, D78611, |
| | | D87367, Y11534 |
| CHODL (Chondrolectin) | TM; 140 | BC009418, NM_024944, AF257472, |
| | | AF523313, AF523314, AF523315, |
| | | AY358608 |
| TRIO; Triple functional | TM; 141 | AB115332, AK131423, NM_007118, |
| domain (PTPRF | | U42390, AF091395, BC017268, |
| interacting) | | BC035585, AB209754 |
| IL10RA (Interleukin 10 | TM; 142 | BC028082, NM_001558, AB209626, |
| receptor, alpha) | | U00672, BC028082 |
| LGALS3BP (Lectin, | ECM/PM; | BC002403, BC002998, BC015761, |
| galactoside-binding, | 143 | NM_005567, AK055977, AK057776, |
| soluble, 3 binding protein) | | L13210, X79089 |
| STK4 (Serine/threonine | TM/nucleus; | NM_006282, AK027088, BC042861, |
| kinase 4) | 144 | AB209315, BC093768, U18297, |
| | | U60207, BC005231 |
| ERBB3 (V-erb-b2 | TM; 145 | AK125028, NM_001982, |
| erythroblastic leukemia | | NM_001005915, BC082992, M29366, |
| viral oncogene homolog 3 | | M34309, S61953, U88357, U88358, |
| (avian) | | U88359, U88360, BC002706 |
| C14orf28 | TM; 146 | NM_001017923, BC105030, |
| | | BC105032, BC030258, AF250395 |
| KIAA1024 | TM; 147 | AF035294, AB028947, NM_015206 |
| CCL15 (chemokine (C-C | Secreted; 148 | NM_032965, NM_004167, |
| motif) ligand 15) | | NM_032964, NG_003025, DR005483 |
| PLA2G2D (Phospholipase | Secreted; 149 | AF112982, BC025706, NM_012400, |
| A2, group IID) | | AF188625 |
| KIAA1906 | TM; 150 | BC113366, AB067493, NM_020203, |
| | | AL080061, AB209172, AK090767, |
| | | NM_052907, AK093097 |
| F3; Coagulation factor III | TM; 151 | X07680, NM_001993, AF497569, |
| (thromboplastin, tissue | | AF497570, J02931, M16553, M27436 |
| factor) | | |
| PCDHB2 (Protocadherin | TM; 152 | BC098575, NM_018936, AF217756, |
| beta 2) | | AK027526, BC098347, AF152495, |
| | | BC098347 |
| KIAA0703 | TM; 153 | AK025424, AY791884, AK092737, |
| | | NM_014861, AB014603, CR749829, |
| | | BX648333 |
| C1orf10 (CRNN; Cornulin) | TM; 154 | BC030807, NM_016190, AF077831, |
| | | BC030807 |
| POLYDOM (SVEP1 | TM; 155 | AL079279, AL832416, AJ619977, |
| (Sushi, von Willebrand | | AK075200, AK075234, AY243503, |
| factor type A, EGF and | | AY916667, BX537918 |
| pentraxin domain | | |
| containing 1) | | |
| TUBAL3 (Tubulin, alpha- | TM; 156 | NM_024803, AK025318, BC098247, |
| like 3) | | BC105634, BC099716 |
| GPR105 (Purinergic | TM; 157 | BC034989, NM_014879, D13626 |
| receptor P2Y, G-protein | | |
| coupled, 14) | | |
| CNTN6 (Contactin 6) | PM; 158 | NM_014461, AB003592, BC113118, |
| | | BC113118 |
| IL7R (Interleukin 7 | TM; 159 | AF373204, AL713738, BC067537, |
| receptor) | | BC069999, BC067539, BC067540, |
| | | M29696 |
| ARHGAP18 (Rho GTPase | TM; 160 | BC017223, BC039611, BC052295, |
| activating protein 18) | | BC062417, BC107416, BC101708, |
| | | BC111940 |
| GRM1 (Glutamate | TM; 161 | NM_000838, AB208837, L76627, |
| receptor, metabotropic 1) | | U31215, U31216, L76631 |
| PREX1 (Phosphatidyl- | PM/cytosol; | BC009948, BC053616, NM_020820, |
| inositol 3,4,5-trisphosphate- | 162 | AB037836, AJ320261, AL136579, |
| dependent RAC exchanger | | AL832913 |
| 1) | | |
| MUC3A (Mucin 3A, | ECM/TM; | AW842071, M55405, M55406, |
| intestinal) | 163 | AF007194, AF143373 |
| LTBP2 (Latent | ECM; 164 | BC078659, S82451, Z37976, |
| transforming growth factor | | NM_000428, AF113211, AB209865 |
| beta binding protein 2) | | |
| EPSTI1 (Epithelial stromal | TM; 165 | BC023660, NM_033255, AF396928, |
| interaction 1 (breast)) | | NM_001002264, AL831953 |
| UBE2J1 (Ubiquitin- | TM/ER; 166 | BC013973, U93243, NM_016021, |
| conjugating enzyme E2, J1 | | AF151834, AF161502, AF151039, |
| (UBC6 homolog, yeast) | | AK223464 |

*These complexes are associated with actin filaments, some of which are localized to the plasma membrane.

### Example 9

### Further Testing of Transmembrane and Secreted TVM Materials and Experimental Methods

[0390] Cell-free, in vitro Rapid Translation System® (RTS) technology (Roche Applied Science) is used to produce whole proteins or polypeptides derived from extracellular regions.

### Results

[0391] The new transmembrane and secreted TVM identified in Example 8 are tested for enrichment of expression in ovarian tumors versus normal ovarian tissue and in different malignancies and tissues with physiologic angiogenesis, as described in Example 3. In other experiments, frozen specimens are used. In other experiments, paraffin-embedded specimens are used. Alternatively, the new TVM are used to localize ovarian cancer tumor vasculature using IHC or ISH, as described in Example 4. In another embodiment, double immuno-staining for CD31 in parallel is used to show co-localization in the endothelium. In another embodiment, antibodies raised against the proteins, or against extracellular fragments thereof, are utilized. In another embodiment, the antibodies are generated using methods described herein. In another embodiment, nucleic acids that hybridize with the identified transcripts are utilized. These experiments confirm that the identified transcripts, and the proteins they encode, are robust TVM.

### Example 10

### Use of Adlican as a Tumor Marker In Vivo

### Materials and Experimental Methods

[0392] Anti-Adlican antibody was produced by Prosci Inc., Poway, Calif.

### Results

[0393] One extracellular matrix marker identified, adlican, was cloned, a fragment of it (CPGAKALSRVREDIVEDE; SEQ ID No: 88) was expressed, and rabbit anti-adlican antiserum was produced and used to screen normal and tumor tissue samples. Adlican was detected by immuno-staining in tumor but not in normal ovary stroma or vasculature. In addition, the antiserum was used to screen serum and ascites of patients with stage III ovarian cancer, and control healthy women. Adlican was detected by Western blot in the tumor samples, but not the control samples (FIG. 9D).

[0394] Thus, TMV of the present invention are efficacious in detecting, localizing, and specifically delivering drugs or anti-tumor agents to tumor cells. In addition, these results show that certain secretory TVM of the present invention are shed into the circulation, where they can function as tumor biomarkers. Thus, tests of biological fluids (e.g. blood, lymph, etc) can be successfully used to screen for tumors using TVM of the present invention.

### Example 11

### Identification of Additional TVM

### Materials and Experimental Methods

[0395] Additional TVM were identified from the list of genes described in Example 1, according to the following criteria: (1) Genes which were determined to be present in 75% of tumor vasculature specimens and absent in normal vasculature; and (2) genes which were present in 75% of tumor vasculature specimens and greater than 5-fold upregulated versus normal ovarian endothelium.

### Results

[0396] Additional TVM were identified; this list overlapped significantly with the list in Table 5. Some of the additional TVM that do not appear in the above tables are set forth in Table 8. Each GenBank Accession No. represents a separate embodiment of the present invention:

| | SEQ ID | Sequence and/or exemplary GenBank |
|---|---|---|
| Gene name: | Number | Accession Numbers |
| HOXA9 | 167 | BC006537, BC010023, NM_152739, |
| (Homeobox A9) | | U41813, NM_002142, U82759, |
| | | BT006990 |
| SLPI (Secretory | 168 | BC020708, NM_003064, X04470, |
| leukocyte peptidase | | X04503, AF114471 |
| inhibitor) | | |
| KIBRA (also | 169 | BC004394, AK001727, NM_015238, |
| known as WWC1; | | BC017746, AF506799, AY189820, |
| WW, C2 and coiled- | | AF530058, AB020676, BX640827 |
| coil domain | | |
| containing 1) | | |

[0397] In vivo expression analyses validated the markers in Table 8 and DEFB1, IL10RA, ADAM12, PCDH17, F-spondin, TNFAIP6, BLAME, AML-1, HEVIN, EPB41L3, SLIT2, and LZTS1, which also were identified in this analysis. Measurement of expression in normal ovarian tissue vs. tumor, and an array of normal tissues vs. tumors, performed as described in the above Examples, both validated each of these markers (FIG. 3).

[0398] Additional TVM identified in the above analysis (besides those enumerated elsewhere herein) were MGAT4A, AFAP, CXCR4, UCP2, TWIST, SLC2A3, MYO1B, COL4A2, MGC4677, G1P2, BHLHB3, NEDL2, and ITGA1 (FIG. 11).

[0399] Thus, as in previous Examples, each of the markers tested in this Example are bona fide TVM.

### Example 12

### Identification of Additional Transmembrane (TM) and Secreted TVM

[0400] Additional TVM were identified from the list of genes described in Example 1, according to the following criteria: A. For each gene, the individual rank values of the 5 normal endothelium samples were summed; the sum of ranks had to be less or equal to 25; (2) AND/OR the fold change (mean tumor to mean normal) had to be greater or equal to 3. From these genes, all genes with either TM or extracellular function were selected.

[0401] The additional TVM are listed in FIG. 12, together with GenBank Accession Numbers for those markers not listed elsewhere herein (SEQ ID No: 170-211). Each GenBank Accession No. represents a separate embodiment of the present invention.

### Example 13

### Development of New Antibodies Against TVM

### Materials and Experimental Methods

### Peptides

[0402] Peptides are synthesized using an Fmoc-based chemical strategy.

### Antibodies

[0403] Antibody production is outsourced to specialized biotechnology companies; e.g. Prosci Inc. (Poway, Calif.). To exclude any Fc fragment-mediated effects that may interfere with Ab specificity, Abs are prepared as F(ab′)₂ fragments.

### Results

[0404] The TVM identified in the above Examples are used as targets for the development of epitope-specific monoclonal (m)Abs and affinity-purified anti-peptide polyclonal (p)Abs. For target screening, affinity-purified pAbs are initially generated. In other experiments, synthetic peptides spanning epitopic regions of 20-30 extracellular hydrophilic residues from secretory or transmembrane proteins from the above Examples are synthesized. In another embodiment, the epitopic regions of extracellular hydrophilic residues are deduced based on their primary sequence.

[0405] Monoclonal antibodies to whole proteins are generated for promising candidates.

[0406] The work described herein generates and identifies mAb and pAb for screening and validation studies. Certain of these Abs are also suitable to clinical applications for serum cancer diagnostics, e.g. as described below

### Example 14

### Identification of Additional TVM Using Phage Display Libraries

### Materials and Experimental Methods

### Phage Display Libraries

[0407] To derive human Abs, a non-immune library of phage-displayed human single-chain Fv Abs is generated.

### Construction of the VH Library

[0408] Total RNA is prepared from ovarian cancer cells and normal ovary samples. cDNA is synthesized from total RNA primed with the HuIgMFOR primer (TGGAAGAGGCACGTTCTTTTCTTT; SEQ ID No: 71). VH gene repertoires are amplified from the cDNA by using Vent DNA polymerase (New England Biolabs) in combination with the HuIgMFOR primer and an equimolar mixture of HuVHBACK primers (CAGGTGCAGCTGGTGCAGTCTGG—SEQ ID No: 72—CAGGTCAACTTAAGGGAGTCTGG—SEQ ID No: 73; GAGGTGCAGCTGGTGGAGTCTGG—SEQ ID No: 74; CAGGTGCAGCTGCAGGAGTCGGG—SEQ ID No: 75; CAGGTACAGCTGCAGCAGTCAGG—SEQ ID No: 76). PCR products are agarose gel-purified and re-amplified to append NcoI and NotI restriction sites by using Tth DNA polymerase (Epicentre Technologies, Madison, Wis.) and an equimolar mixture of the HuVHBACK Sfi primers (GTCCTCGCAACTGCGGCCCAGCCGGCCATGGCCCAGGTCAACTTAAGGGAG TCTGG—SEQ ID No: 77) GTCCTCGCAACTGCGGCCCAGCCGGCCATGGCCGAGGTGCAGCTGGTGGAG TCTGG—SEQ ID No: 78; GTCCTCGCAACTGCGGCCCAGCCGGCCATGGCCCAGGTGCAGCTGCAGGAG TCGGG—SEQ ID No: 79; GTCCTCGCAACTGCGGCCCAGCCGGCCATGGCCCAGGTGCAGCTGTTGCAG TCTGC—SEQ ID No: 80; GTCCTCGCAACTGCGGCCCAGCCGGCCATGGCCCAGGTACAGCTGCAGCAG TCAGG—SEQ ID No: 81) and the HuCMFor Not primer (5′-GAGTCATTCTCGACTTGCGGCCGCTGGAAGAGGCACGTTCTTTTCTTT-3′; SEQ ID No: 82). The PCR products are digested with NcoI and NotI and agarose gel-purified. The resulting DNA fragments are ligated into the plasmid pCITE3A (Novagen; any plasmid that contains the proper restriction sites for cloning and unique sequences for PCR amplification works as well) and cut with restriction enzymes NcoI and NotI, and the ligated DNA is electroporated into the E. coli strain TG1. If desired, cloning efficiency and library diversity ix determined by PCR screening.

Construction of the scFv Library

[0409] The VH gene repertoire is PCR-amplified from the pCITE-VH library by using 300 ng of library plasmid DNA as a template, Vent DNA polymerase, the CITE3 primer (GATCTGATCTGGGGCCTCGGTGC—SEQ ID No: 83), and an equimolar mixture of HuJH primers. The VL genes for scFv assembly are obtained from an available scFv phage antibody library. The VL gene repertoire, including DNA encoding the scFv peptide linker (G₄S)₃, is amplified from 300 ng of library plasmid DNA by using Vent DNA polymerase, the Gene3 primer (5′-GCAAGCCCAATAGGAACCCATGTACCG—SEQ ID No: 84), and an equimolar mixture of RHuJH primers. The amplified VH and VL genes are agarose gel-purified and spliced together with overlap extension PCR to create a scFv gene repertoire. To facilitate joining VH and VL gene repertoires with overlap extension PCR, the input DNA fragments have blunt ends. The proofreading DNA polymerase Vent is used to generate the VH and VL DNA fragments for scFv assembly. For all subsequent PCR steps of library construction, Tth DNA polymerase was found to be the optimal enzyme. The VH and VL gene repertoires are spliced together in 100-μl PCR reactions containing 100 ng of the VH and VL DNA fragments and Tth DNA polymerase. The reactions are cycled eight times (95° C. 2 min, 55° C., 1 min, and 72° C. 3 min) to join the fragments. Then the CITE3 and Gene3 primers are added, and the reaction is cycled 30 times (94° C. 1 min, 55° C. 1 min, and 72° C. 3 min) to amplify the assembled scFv genes. The scFv genes are digested with restriction enzymes NcoI and NotI, agarose gel-purified, and ligated into the plasmid pHEN-1 digested with NcoI and NotI. The ligated DNA is electroporated into E. coli TG1 cells

[0410] This method enables rapid production of panels (˜7×10⁹) of high-affinity (<1 nM) mAbs, which are desirable for therapeutics and diagnostics.

### Results

[0411] Single-chain Fv (scFv) Ab phage display libraries are generated from patients with ovarian cancer and screened to identify antibodies (Abs) recognizing TVM identified in the above Examples. To identify auto-Abs that recognize TVM in ovarian cancer patients, phage display libraries are generated from ovarian cancer tumor samples. Separate IgGκ and IgGλ phage libraries are constructed, using the phagemid vector pComb3X (Scripps Research Institute) from 4×10⁷ peripheral blood or ascites mononuclear cells. For library selection, IgGκ and IgGλ Ab phage display libraries are combined in equal amounts and panned by solid-phase selection on ELISA plates coated with generated peptides or proteins. Binding of individual phage clones isolated from each round of panning can be confirmed by ELISA, if desired. The VH and VL nucleic acid sequences are determined for positive clones to establish a cohort of unique mAbs specific to TVM. scFv monoclonal preparations unlinked to phages are produced using TOP10F′ non-suppressor E. coli. In other experiments, phage display libraries are panned on frozen tissue sections of normal ovaries and then on sections of ovarian cancer. Slides are then subjected to immuno-LCM, as described in previous Examples. With this approach, phages recognizing TVM are removed selectively from the tissue. RNA is isolated and used to infect additional phages. Serial panning between normal and tumor tissue leads to the selection to tumor vascular-specific phages, which are then used to develop Abs as above. With this alternative approach, additional TVM are identified

[0412] In other experiments, human scFv Ab libraries from normal donors are screened.

### Example 15

### Use of Transmembrane TVM for Tumor Localization In Vivo

[0413] The transmembrane TVM identified in the above Examples are used as targets for localizing ovarian or other solid tumors, as described for Adlican in Example 10. In other embodiments, radio-labeled antibodies are used for imaging. In another embodiment, positron-emission tomography is used.

### Example 16

### Use of Transmembrane TVM for Delivery of Anti-Tumor Agents In Vivo

[0414] In another embodiment, an antibody identified in one of the above Examples is used to target an anti-tumor agent to ovarian or other solid tumor in vivo. In some experiments, the anti-tumor agent is a radioactive antibody. In other experiments, the anti-tumor agent is an antibody conjugated to a nanosphere that contains an anti-tumor drug.

### Example 17

### Use of Secreted TVM for Serum Diagnostic Testing of Cancer In Vivo

[0415] Existing Abs and novel Abs or scFv identified in the above Examples, recognizing secretory TVM of the present invention, are tested for serum diagnostic applications. ELISA is utilized to test how well each TVM performs as a biomarker for ovarian cancer serum detection. In addition, TVM are tested as biomarkers for other solid tumors.

### Example 18

### Use of Transmembrane TVM for Vasculature-Redirected Lymphocyte Therapy

[0416] Chimeric immuno-receptors composed of high-affinity scFv recognizing TVM of the present invention (Example 14) fused to the cytoplasmic signaling modules of T cell receptor, CD28 and 4-1BB are created as described in Ledbetter J A et al (Enhanced transmembrane signaling activity of monoclonal antibody hetero-conjugates suggests molecular interactions between receptors on the T cell surface. Mol. Immunol. 1989 February; 26(2):137-45). The chimeric receptors are then utilized for vasculature-redirected lymphocyte therapy.

### Example 19

### Additional Studies with TNFRSF21 (DR6)

[0417] Expression of DR6 mRNA was determined in a variety of normal and tumor tissues by Affymetrix® array. Expression was relatively low in normal tissues (Table 9), while DR6 was heavily expressed in many tumor tissues, particularly bladder (Table 10).

TABLE 9
Affymetrix array scores of DR6 in normal tissues.

| | Affy |
|---|---|
| Tissue | score |
| Adipose tissue | 6 |
| Adrenal gland cortex | 4 |
| Bone marrow | 4 |
| Bronchus | 6 |
| Cerebellum | 5 |
| Cerebral cortex | 6 |
| Cerebrum | 6 |
| Cervix | 5 |
| Coronary artery | 5 |
| Colon cecum | 5 |
| Endometrium | 5 |
| Esophagus | 6 |
| Heart atrium | 5 |
| Heart ventricle | 5 |
| Kidney cortex | 6 |
| Kidney medulla | 6 |
| Liver | 4 |
| Lung | 5 |
| Lymph nodes | 6 |
| Mammary gland | 5 |
| Medulla | 6 |
| Midbrain | 6 |
| Myometrium | 5 |
| Nipple cross section | 5 |
| Oral mucosa | 6 |
| Ovary | 4 |
| Pharyngeal mucosa | 6 |
| Pituitary gland | 5 |
| Prostate gland | 5 |
| Salivary gland | 5 |
| Saphenous vein | 5 |
| Skeletal muscle | 4 |
| Spinal cord | 7 |
| Spleen | 4 |
| Stomach | 6 |
| Testes | 4 |
| Thyroid gland | 4 |
| Tongue | 6 |
| Tonsil | 6 |
| Trachea | 7 |
| Trigeminal ganglia | 6 |
| Urethra | 6 |
| Vagina | 5 |
| Vulva | 5 |

TABLE 10
Affymetrix array scores of DR6 in tumor tissues.

| | Affy |
|---|---|
| Tissue | score |
| Adrenal gland | 7 |
| Bladder | 8 |
| Brain | 6 |
| Breast | 6 |
| Cervix | 7 |
| Colon | 7 |
| Corpus uteri | 6 |
| Endometrium | 7 |
| Esophagus | 6 |
| Kidney | 7 |
| Liver | 7 |
| Lung | 7 |
| Omentum | 6 |
| Ovary | 7 |
| Pancreas | 7 |
| Prostate | 6 |
| Rectosigmoid | 7 |
| Small intestine | 6 |
| Stomach | 7 |
| Testis | 7 |
| Thyroid | 5 |
| Vulva | 6 |

[0418] Further, enhanced expression of DR6 in ovarian tumor relative to normal ovary tissue was confirmed by qPCR and IHC (FIG. 13A-B). In addition, increased serum levels of DR6 were found in serum of patients with ovarian tumors compared to healthy individuals (FIG. 14). Thus, DR6 is efficacious as a tumor marker (e.g. for ovarian tumors), both in situ and in tumors.

### Example 20

### Additional Studies with ADAM12

[0419] Expression of ADAM12 mRNA was determined in a variety of normal and tumor tissues by Affymetrix® array. Expression was relatively low in normal tissues (Table 11); while DR6 was significantly enriched in several tumor tissues (Table 12).

TABLE 11
Affymetrix array scores of ADAM12 in normal tissues.

| | Affy |
|---|---|
| Tissue | score |
| Adipose tissue | 3 |
| Adrenal gland cortex | 2 |
| Bone marrow | 2 |
| Bronchus | 2 |
| Cerebellum | 2 |
| Cerebral cortex | 2 |
| Cerebrum | 2 |
| Cervix | 2 |
| Colon cecum | 2 |
| Coronary artery | 2 |
| Endometrium | 5 |
| Esophagus | 2 |
| Heart atrium | 2 |
| Heart ventricle | 2 |
| Kidney cortex | 2 |
| Kidney medulla | 2 |
| Liver | 2 |
| Lung | 2 |
| Lymph nodes | 3 |
| Mammary gland | 3 |
| Medulla | 2 |
| Midbrain | 2 |
| Myometrium | 2 |
| Nipple cross section | 2 |
| Oral mucosa | 2 |
| Ovary | 4 |
| Pharyngeal mucosa | 2 |
| Pituitary gland | 2 |
| Prostate gland | 2 |
| Salivary gland | 2 |
| Saphenous vein | 2 |
| Skeletal muscle | 2 |
| Spinal cord | 2 |
| Spleen | 2 |
| Stomach | 2 |
| Testes | 2 |
| Thyroid gland | 2 |
| Tongue | 2 |
| Tonsil | 3 |
| Trachea | 2 |
| Trigeminal ganglia | 2 |
| Urethra | 2 |
| Vagina | 2 |
| Vulva | 3 |

TABLE 12
Affymetrix array scores of ADAM12 in tumor tissues.

| | Affy |
|---|---|
| Tissue | score |
| Adrenal gland | 5 |
| Bladder | 5 |
| Brain | 3 |
| Breast | 6 |
| Cervix | 5 |
| Colon | 5 |
| Corpus uteri | 6 |
| Endometrium | 5 |
| Esophagus | 3 |
| Kidney | 3 |
| Liver | 5 |
| Lung | 5 |
| Omentum | 5 |
| Ovary | 4 |
| Pancreas | 5 |
| Prostate | 3 |
| Rectosigmoid | 5 |
| Small intestine | 3 |
| Stomach | 3 |
| Testis | 3 |
| Thyroid | 3 |
| Vulva | 6 |

[0420] Further, enhanced expression of ADAM12 in ovarian tumor relative to normal tissues was confirmed by qPCR (FIG. 15). In addition, staining of ADAM12 was demonstrated in ovarian tumors (FIG. 16). The relevance of ADAM12 as a TVM was further confirmed by co-staining with CD31 and CD45 (FIGS. 17-18). Thus, ADAM12 is efficacious as a tumor marker (e.g. for ovarian tumors), further validating the results of the present invention.

### Example 21

### Additional Studies with CDCP1

[0421] Expression of CDCP1 mRNA was determined in a variety of normal and tumor tissues by Affymetrix® array. Expression was significantly enriched in several tumor tissues compared to most normal tissues (Tables 14 and 13, respectively).

TABLE 13
Affymetrix array scores of CDCP1 in normal tissues.

| | Affy |
|---|---|
| Tissue | score |
| Adipose tissue | 3 |
| Adrenal gland cortex | 3 |
| Bone marrow | 3 |
| Bronchus | 3 |
| Cerebellum | 3 |
| Cerebral cortex | 3 |
| Cerebrum | 3 |
| Cervix | 3 |
| Colon cecum | 3 |
| Coronary artery | 3 |
| Endometrium | 3 |
| Esophagus | 5 |
| Heart atrium | 3 |
| Heart ventricle | 3 |
| Kidney cortex | 3 |
| Kidney medulla | 3 |
| Liver | 3 |
| Lung | 3 |
| Lymph nodes | 3 |
| Mammary gland | 3 |
| Medulla | 3 |
| Midbrain | 3 |
| Myometrium | 3 |
| Nipple cross section | 4 |
| Oral mucosa | 5 |
| Ovary | 3 |
| Pharyngeal mucosa | 5 |
| Pituitary gland | 3 |
| Prostate gland | 4 |
| Salivary gland | 3 |
| Saphenous vein | 3 |
| Skeletal muscle | 3 |
| Spinal cord | 3 |
| Spleen | 3 |
| Stomach | 4 |
| Testes | 3 |
| Thyroid gland | 4 |
| Tongue | 4 |
| Tonsil | 4 |
| Trachea | 4 |
| Trigeminal ganglia | 3 |
| Urethra | 4 |
| Vagina | 4 |
| Vulva | 5 |

TABLE 14
Affymetrix array scores of CDCP1 in tumor tissues.

| | Affy |
|---|---|
| Tissue | score |
| Adrenal gland | 5 |
| Bladder | 5 |
| Brain | 4 |
| Breast | 5 |
| Cervix | 5 |
| Colon | 5 |
| Corpus uteri | 5 |
| Endometrium | 5 |
| Esophagus | 5 |
| Kidney | 4 |
| Liver | 5 |
| Lung | 5 |
| Omentum | 5 |
| Ovary | 5 |
| Pancreas | 5 |
| Prostate | 4 |
| Rectosigmoid | 5 |
| Small intestine | 5 |
| Stomach | 5 |
| Testis | 3 |
| Thyroid | 4 |
| Vulva | 5 |

[0422] Further, enhanced expression of the short isoform of CDCP1 in ovarian tumor relative to normal tissues was confirmed by qPCR (FIG. 19). In addition, staining of CDCP1 was demonstrated in ovarian tumors (FIG. 20). Thus, CDCP1 is efficacious as a tumor marker (e.g. for ovarian tumors), further validating the results of the present invention.

### Example 22

### Additional Studies with SLC11A1

[0423] Expression of SLC11A1 mRNA was determined in a variety of normal and tumor tissues by Affymetrix® array. Expression was significantly enriched in several tumor tissues compared to most normal tissues (Tables 16 and 15, respectively).

TABLE 15
Affymetrix array scores of SLC11A1 in normal tissues.

| | Affy |
|---|---|
| Tissue | score |
| Adipose tissue | 4 |
| Adrenal gland cortex | 4 |
| Bone marrow | 5 |
| Bronchus | 4 |
| Cerebellum | 4 |
| Cerebral cortex | 4 |
| Cerebrum | 4 |
| Cervix | 4 |
| Colon cecum | 4 |
| Coronary artery | 4 |
| Endometrium | 4 |
| Esophagus | 4 |
| Heart atrium | 4 |
| Heart ventricle | 4 |
| Kidney cortex | 4 |
| Kidney medulla | 4 |
| Liver | 4 |
| Lung | 5 |
| Lymph nodes | 4 |
| Mammary gland | 4 |
| Medulla | 4 |
| Midbrain | 4 |
| Myometrium | 4 |
| Nipple cross section | 4 |
| Oral mucosa | 4 |
| Ovary | 4 |
| Pharyngeal mucosa | 4 |
| Pituitary gland | 4 |
| Prostate gland | 4 |
| Salivary gland | 4 |
| Saphenous vein | 4 |
| Skeletal muscle | 5 |
| Spinal cord | 4 |
| Spleen | 4 |
| Stomach | 4 |
| Testes | 4 |
| Thyroid gland | 4 |
| Tongue | 4 |
| Tonsil | 4 |
| Trachea | 4 |
| Trigeminal ganglia | 4 |
| Urethra | 4 |
| Vagina | 4 |
| Vulva | 5 |

TABLE 16
Affymetrix array scores of SLC11A1 in tumor tissues.

| | Affy |
|---|---|
| Tissue | score |
| Adrenal gland | 4 |
| Bladder | 5 |
| Brain | 5 |
| Breast | 5 |
| Cervix | 5 |
| Colon | 5 |
| Corpus uteri | 5 |
| Endometrium | 5 |
| Esophagus | 4 |
| Kidney | 5 |
| Liver | 5 |
| Lung | 5 |
| Omentum | 5 |
| Ovary | 5 |
| Pancreas | 5 |
| Prostate | 5 |
| Rectosigmoid | 5 |
| Small intestine | 5 |
| Stomach | 5 |
| Testis | 5 |
| Thyroid | 5 |
| Vulva | 5 |

[0424] Further, enhanced expression of SLC11A1 in ovarian tumor relative to normal tissues was confirmed by qPCR (FIG. 21). In addition, staining of SLC11A1 was demonstrated in ovarian tumors (FIG. 22). The relevance of SLC11A1 as a TVM was further confirmed by co-staining with CD31 and CD45 (FIGS. 23-24). Thus, SLC11A1 is efficacious as a tumor marker (e.g. for ovarian tumors).

### Example 23

### Additional Studies with Blame

[0425] Expression of BLAME mRNA was determined in a variety of normal and tumor tissues by Affymetrix® array. Expression was significantly enriched in most tumor tissues compared to most normal tissues (Tables 18 and 17, respectively).

TABLE 17
Affymetrix array scores of BLAME in normal tissues.

| | Affy |
|---|---|
| Tissue | score |
| Adipose tissue | 3 |
| Adrenal gland cortex | 2 |
| Bone marrow | 3 |
| Bronchus | 3 |
| Cerebellum | 2 |
| Cerebral cortex | 2 |
| Cerebrum | 2 |
| Cervix | 2 |
| Colon cecum | 3 |
| Coronary artery | 3 |
| Endometrium | 2 |
| Esophagus | 2 |
| Heart atrium | 2 |
| Heart ventricle | 2 |
| Kidney cortex | 2 |
| Kidney medulla | 2 |
| Liver | 3 |
| Lung | 4 |
| Lymph nodes | 5 |
| Mammary gland | 3 |
| Medulla | 2 |
| Midbrain | 2 |
| Myometrium | 2 |
| Nipple cross section | 3 |
| Oral mucosa | 3 |
| Ovary | 2 |
| Pharyngeal mucosa | 3 |
| Pituitary gland | 2 |
| Prostate gland | 2 |
| Salivary gland | 2 |
| Saphenous vein | 3 |
| Skeletal muscle | 2 |
| Spinal cord | 2 |
| Spleen | 3 |
| Stomach | 3 |
| Testes | 2 |
| Thyroid gland | 3 |
| Tongue | 3 |
| Tonsil | 4 |
| Trachea | 3 |
| Trigeminal ganglia | 3 |
| Urethra | 3 |
| Vagina | 2 |
| Vulva | 2 |

TABLE 18
Affymetrix array scores of BLAME in tumor tissues.

| | Affy |
|---|---|
| Tissue | score |
| Adrenal gland | 6 |
| Bladder | 5 |
| Brain | 3 |
| Breast | 5 |
| Cervix | 4 |
| Colon | 5 |
| Corpus uteri | 5 |
| Endometrium | 4 |
| Esophagus | 4 |
| Kidney | 5 |
| Liver | 5 |
| Lung | 5 |
| Omentum | 5 |
| Ovary | 4 |
| Pancreas | 5 |
| Prostate | 4 |
| Rectosigmoid | 5 |
| Small intestine | 5 |
| Stomach | 4 |
| Testis | 7 |
| Thyroid | 4 |
| Vulva | 5 |

[0426] Further, enhanced expression of BLAME in ovarian tumor relative to normal tissues was confirmed by qPCR (FIG. 25). In addition, staining of BLAME was demonstrated in ovarian tumors (FIG. 26). The relevance of BLAME as a TVM was further confirmed by co-staining with CD31 and CD45 (FIG. 27). Thus, BLAME is efficacious as a tumor marker (e.g. for ovarian, adrenal, and testis tumors).

### Example 24

### Additional Studies with ESM1

[0427] Expression of ESM1 mRNA was determined in a variety of normal and tumor tissues by Affymetrix® array. Expression was significantly enriched in tumor tissues compared to normal tissues (Tables 20 and 19, respectively).

TABLE 19
Affymetrix array scores of ESM1 in normal tissues.

| | Affy |
|---|---|
| Tissue | score |
| Adipose tissue | 2 |
| Adrenal gland cortex | 2 |
| Bone marrow | 2 |
| Bronchus | 2 |
| Cerebellum | 2 |
| Cerebral cortex | 2 |
| Cerebrum | 2 |
| Cervix | 2 |
| Colon cecum | 2 |
| Coronary artery | 2 |
| Endometrium | 3 |
| Esophagus | 2 |
| Heart atrium | 2 |
| Heart ventricle | 2 |
| Kidney cortex | 3 |
| Kidney medulla | 2 |
| Liver | 2 |
| Lung | 3 |
| Lymph nodes | 2 |
| Mammary gland | 2 |
| Medulla | 2 |
| Midbrain | 2 |
| Myometrium | 2 |
| Nipple cross section | 2 |
| Oral mucosa | 2 |
| Ovary | 2 |
| Pharyngeal mucosa | 2 |
| Pituitary gland | 2 |
| Prostate gland | 2 |
| Salivary gland | 2 |
| Saphenous vein | 2 |
| Skeletal muscle | 2 |
| Spinal cord | 2 |
| Spleen | 2 |
| Stomach | 2 |
| Testes | 2 |
| Thyroid gland | 2 |
| Tongue | 2 |
| Tonsil | 2 |
| Trachea | 2 |
| Trigeminal ganglia | 2 |
| Urethra | 2 |
| Vagina | 2 |
| Vulva | 2 |

TABLE 20
Affymetrix array scores of ESM1 in tumor tissues.

| | Affy |
|---|---|
| Tissue | score |
| Adrenal gland | 6 |
| Bladder | 3 |
| Brain | 3 |
| Breast | 3 |
| Cervix | 3 |
| Colon | 3 |
| Corpus uteri | 4 |
| Endometrium | 3 |
| Esophagus | 3 |
| Kidney | 6 |
| Liver | 3 |
| Lung | 4 |
| Omentum | 4 |
| Ovary | 4 |
| Pancreas | 3 |
| Prostate | 3 |
| Rectosigmoid | 3 |
| Small intestine | 3 |
| Stomach | 3 |
| Testis | 3 |
| Thyroid | 3 |
| Vulva | 3 |

[0428] Thus, ESM1 is efficacious as a tumor marker (e.g. for ovarian, adrenal, and kidney tumors).

### Example 25

### Additional Expression Studies

[0429] mRNA expression levels of additional markers were determined in a variety of normal and tumor tissues by Affymetrix® array. Results are depicted in Tables 21-28.

TABLE 21
Affymetrix array scores of additional markers in normal tissues.

| | | SCGB- | | | | | |
|---|---|---|---|---|---|---|---|
| Tissue | c6orf55 | 2A1 | DSG2 | EPSTI1 | SEC-23B | MS4A6A | LOC51136 |
| Adipose | 4 | 2 | 4 | 4 | 3 | 5 | 3 |
| tissue | | | | | | | |
| Adrenal | 4 | 2 | 2 | 4 | 2 | 5 | 3 |
| gland | | | | | | | |
| cortex | | | | | | | |
| Bone | 4 | 2 | 2 | 4 | 2 | 5 | 3 |
| marrow | | | | | | | |
| Bronchus | 4 | 3 | 4 | 4 | 5 | 4 | 2 |
| Cerebellum | 4 | 2 | 2 | 3 | 2 | 4 | 2 |
| Cerebral | 4 | 2 | 2 | 3 | 2 | 4 | 2 |
| cortex | | | | | | | |
| Cerebrum | 4 | 2 | 2 | 3 | 2 | 4 | 2 |
| Cervix | 4 | 4 | 3 | 4 | 2 | 4 | 3 |
| Colon | 4 | 2 | 4 | 4 | 2 | 4 | 2 |
| cecum | | | | | | | |
| Coronary | 4 | 2 | 3 | 4 | 4 | 5 | 2 |
| artery | | | | | | | |
| Endo- | 4 | 7 | 4 | 4 | 4 | 4 | 3 |
| metrium | | | | | | | |
| Esophagus | 5 | 2 | 3 | 3 | 2 | 4 | 2 |
| Heart | 4 | 2 | 5 | 4 | 2 | 5 | 3 |
| atrium | | | | | | | |
| Heart | 4 | 2 | 4 | 4 | 2 | 4 | 2 |
| ventricle | | | | | | | |
| Kidney | 4 | 2 | 5 | 4 | 2 | 4 | 2 |
| cortex | | | | | | | |
| Kidney | 4 | 2 | 5 | 4 | 2 | 4 | 2 |
| medulla | | | | | | | |
| Liver | 4 | 2 | 3 | 4 | 2 | 6 | 3 |
| Lung | 4 | 2 | 3 | 5 | 2 | 5 | 3 |
| Lymph | 4 | 2 | 2 | 5 | 2 | 6 | 3 |
| nodes | | | | | | | |
| Mammary | 4 | 4 | 5 | 4 | 3 | 5 | 3 |
| gland | | | | | | | |
| Medulla | 4 | 2 | 2 | 4 | 2 | 4 | 2 |
| Midbrain | 4 | 2 | 2 | 4 | 2 | 4 | 2 |
| Myo- | 4 | 2 | 2 | 3 | 2 | 4 | 2 |
| metrium | | | | | | | |
| Nipple | 4 | 3 | 3 | 3 | 2 | 4 | 2 |
| cross | | | | | | | |
| section | | | | | | | |
| Oral | 5 | 2 | 3 | 4 | 2 | 5 | 3 |
| mucosa | | | | | | | |
| Ovary | 4 | 2 | 3 | 4 | 2 | 4 | 3 |
| Pharyngeal | 5 | 3 | 3 | 3 | 3 | 5 | 3 |
| mucosa | | | | | | | |
| Pituitary | 4 | 3 | 2 | 4 | 2 | 4 | 2 |
| gland | | | | | | | |
| Prostate | 4 | 4 | 5 | 4 | 2 | 4 | 3 |
| gland | | | | | | | |
| Salivary | 4 | 4 | 5 | 4 | 3 | 4 | 3 |
| gland | | | | | | | |
| Saphenous | 4 | 2 | 2 | 4 | 3 | 5 | 2 |
| vein | | | | | | | |
| Skeletal | 5 | 2 | 2 | 4 | 3 | 4 | 2 |
| muscle | | | | | | | |
| Spinal cord | 4 | 2 | 2 | 4 | 2 | 5 | 2 |
| Spleen | 5 | 2 | 2 | 5 | 2 | 5 | 3 |
| Stomach | 4 | 4 | 4 | 4 | 2 | 5 | 3 |
| Testes | 4 | 2 | 2 | 4 | 3 | 4 | 6 |
| Thyroid | 4 | 3 | 5 | 4 | 2 | 5 | 3 |
| gland | | | | | | | |
| Tongue | 5 | 4 | 3 | 4 | 3 | 5 | 3 |
| Tonsil | 4 | 2 | 2 | 5 | 2 | 5 | 3 |
| Trachea | 4 | 4 | 4 | 4 | 6 | 5 | 3 |
| Trigeminal | 4 | 2 | 2 | 4 | 2 | 5 | 2 |
| ganglia | | | | | | | |
| Urethra | 5 | 3 | 4 | 4 | 2 | 5 | 3 |
| Vagina | 5 | 2 | 3 | 4 | 2 | 5 | 3 |
| Vulva | 5 | 2 | 3 | 4 | 2 | 4 | 3 |

TABLE 22
Affymetrix array scores of additional markers in normal tissues.

| Tissue | EGFL6 | KCNE3 | KCNE4 | c14orf-100 | C2orf6 | KCNK5 | C14orf28 |
|---|---|---|---|---|---|---|---|
| Adipose | 4 | 4 | 3 | 5 | 2 | 3 | 2 |
| tissue | | | | | | | |
| Adrenal | 2 | 4 | 2 | 5 | 2 | 3 | 2 |
| gland | | | | | | | |
| cortex | | | | | | | |
| Bone | 3 | 5 | 2 | 5 | 3 | 3 | 2 |
| marrow | | | | | | | |
| Bronchus | 3 | 5 | 2 | 5 | 2 | 3 | 2 |
| Cerebellum | 2 | 3 | 2 | 5 | 2 | 3 | 2 |
| Cerebral | 3 | 3 | 2 | 5 | 2 | 3 | 2 |
| cortex | | | | | | | |
| Cerebrum | 3 | 4 | 2 | 5 | 2 | 3 | 2 |
| Cervix | 3 | 5 | 3 | 5 | 3 | 3 | 2 |
| Colon | 2 | 5 | 2 | 4 | 2 | 3 | 2 |
| cecum | | | | | | | |
| Coronary | 2 | 4 | 3 | 4 | 2 | 3 | 2 |
| artery | | | | | | | |
| Endo- | 4 | 5 | 3 | 5 | 3 | 3 | 2 |
| metrium | | | | | | | |
| Esophagus | 3 | 4 | 2 | 5 | 3 | 3 | 2 |
| Heart | 2 | 4 | 2 | 5 | 2 | 3 | 2 |
| atrium | | | | | | | |
| Heart | 3 | 4 | 2 | 4 | 2 | 3 | 2 |
| ventricle | | | | | | | |
| Kidney | 2 | 5 | 2 | 5 | 3 | 5 | 2 |
| cortex | | | | | | | |
| Kidney | 3 | 5 | 2 | 5 | 2 | 4 | 2 |
| medulla | | | | | | | |
| Liver | 3 | 4 | 2 | 5 | 2 | 4 | 3 |
| Lung | 5 | 5 | 2 | 5 | 2 | 3 | 2 |
| Lymph | 3 | 4 | 3 | 5 | 3 | 3 | 2 |
| nodes | | | | | | | |
| Mammary | 6 | 4 | 2 | 5 | 2 | 3 | 2 |
| gland | | | | | | | |
| Medulla | 3 | 4 | 2 | 5 | 2 | 3 | 2 |
| Midbrain | 3 | 4 | 2 | 5 | 2 | 3 | 2 |
| Myo- | 3 | 4 | 4 | 5 | 2 | 3 | 3 |
| metrium | | | | | | | |
| Nipple | 3 | 4 | 2 | 5 | 2 | 3 | 2 |
| cross | | | | | | | |
| section | | | | | | | |
| Oral | 3 | 3 | 2 | 5 | 3 | 3 | 2 |
| mucosa | | | | | | | |
| Ovary | 3 | 5 | 3 | 5 | 3 | 3 | 3 |
| Pharyngeal | 3 | 4 | 2 | 5 | 3 | 3 | 2 |
| mucosa | | | | | | | |
| Pituitary | 3 | 4 | 2 | 5 | 2 | 3 | 2 |
| gland | | | | | | | |
| Prostate | 3 | 4 | 2 | 6 | 3 | 3 | 3 |
| gland | | | | | | | |
| Salivary | 3 | 4 | 2 | 5 | 2 | 3 | 3 |
| gland | | | | | | | |
| Saphenous | 3 | 4 | 5 | 5 | 2 | 3 | 4 |
| vein | | | | | | | |
| Skeletal | 3 | 3 | 2 | 5 | 2 | 3 | 2 |
| muscle | | | | | | | |
| Spinal cord | 3 | 4 | 2 | 6 | 2 | 3 | 2 |
| Spleen | 2 | 5 | 3 | 5 | 3 | 3 | 2 |
| Stomach | 3 | 6 | 3 | 5 | 3 | 3 | 3 |
| Testes | 2 | 3 | 2 | 5 | 2 | 3 | 4 |
| Thyroid | 2 | 5 | 2 | 5 | 2 | 3 | 3 |
| gland | | | | | | | |
| Tongue | 3 | 4 | 2 | 5 | 3 | 3 | 2 |
| Tonsil | 3 | 4 | 2 | 5 | 3 | 3 | 2 |
| Trachea | 3 | 5 | 2 | 5 | 2 | 3 | 2 |
| Trigeminal | 4 | 4 | 3 | 6 | 2 | 3 | 2 |
| ganglia | | | | | | | |
| Urethra | 3 | 5 | 3 | 6 | 3 | 3 | 3 |
| Vagina | 3 | 5 | 2 | 5 | 3 | 3 | 2 |
| Vulva | 3 | 4 | 2 | 5 | 3 | 3 | 2 |

TABLE 23
Affymetrix array scores of additional markers in normal tissues.

| Tissue | PCDHB2 | FZD10 | ST14 | OLFML2B | GPR105 | SDC1 | FLJ46072 |
|---|---|---|---|---|---|---|---|
| Adipose | 4 | 3 | 3 | 5 | 4 | 4 | 4 |
| tissue | | | | | | | |
| Adrenal | 5 | 2 | 2 | 4 | 2 | 3 | 4 |
| gland | | | | | | | |
| cortex | | | | | | | |
| Bone | 4 | 2 | 2 | 3 | 2 | 3 | 3 |
| marrow | | | | | | | |
| Bronchus | 4 | 3 | 4 | 4 | 2 | 4 | 5 |
| Cerebellum | 5 | 3 | 2 | 3 | 2 | 3 | 3 |
| Cerebral | 6 | 2 | 2 | 3 | 2 | 3 | 4 |
| cortex | | | | | | | |
| Cerebrum | 6 | 2 | 2 | 3 | 2 | 3 | 4 |
| Cervix | 5 | 4 | 3 | 5 | 2 | 5 | 4 |
| Colon | 5 | 3 | 4 | 4 | 5 | 4 | 4 |
| cecum | | | | | | | |
| Coronary | 5 | 2 | 2 | 5 | 3 | 2 | 3 |
| artery | | | | | | | |
| Endo- | 4 | 4 | 3 | 6 | 5 | 3 | 4 |
| metrium | | | | | | | |
| Esophagus | 4 | 5 | 2 | 3 | 3 | 7 | 6 |
| Heart | 4 | 2 | 2 | 4 | 3 | 2 | 4 |
| atrium | | | | | | | |
| Heart | 5 | 2 | 2 | 3 | 3 | 3 | 3 |
| ventricle | | | | | | | |
| Kidney | 5 | 2 | 3 | 3 | 2 | 6 | 5 |
| cortex | | | | | | | |
| Kidney | 4 | 2 | 4 | 3 | 2 | 6 | 5 |
| medulla | | | | | | | |
| Liver | 4 | 2 | 3 | 3 | 2 | 7 | 5 |
| Lung | 6 | | 3 | 5 | 4 | 4 | 4 |
| Lymph | 5 | 3 | 2 | 4 | 3 | 3 | 3 |
| nodes | | | | | | | |
| Mammary | 4 | 3 | 3 | 5 | 3 | 4 | 5 |
| gland | | | | | | | |
| Medulla | 6 | 2 | 2 | 3 | 2 | 2 | 3 |
| Midbrain | 6 | 2 | 2 | 4 | 3 | 3 | 3 |
| Myo- | 5 | 2 | 2 | 4 | 2 | 3 | 3 |
| metrium | | | | | | | |
| Nipple | 4 | 4 | 4 | 4 | 4 | 6 | 6 |
| cross | | | | | | | |
| section | | | | | | | |
| Oral | 4 | 5 | 6 | 4 | 4 | 7 | 7 |
| mucosa | | | | | | | |
| Ovary | 4 | 2 | 2 | 4 | 2 | 3 | 3 |
| Pharyngeal | 4 | 6 | 4 | 4 | 4 | 6 | 6 |
| mucosa | | | | | | | |
| Pituitary | 5 | 3 | 3 | 3 | 4 | 3 | 4 |
| gland | | | | | | | |
| Prostate | 4 | 2 | 4 | 3 | 2 | 5 | 5 |
| gland | | | | | | | |
| Salivary | 4 | 3 | 4 | 4 | 2 | 4 | 5 |
| gland | | | | | | | |
| Saphenous | 5 | 3 | 3 | 6 | 4 | 3 | 3 |
| vein | | | | | | | |
| Skeletal | 4 | 3 | 3 | 4 | 4 | 3 | 3 |
| muscle | | | | | | | |
| Spinal cord | 6 | 3 | 2 | 3 | 2 | 2 | 3 |
| Spleen | 7 | 2 | 3 | 3 | 3 | 3 | 3 |
| Stomach | 5 | 3 | 4 | 4 | 5 | 4 | 5 |
| Testes | 6 | 2 | 2 | 5 | 2 | 4 | 4 |
| Thyroid | 4 | 3 | 4 | 5 | 3 | 4 | 6 |
| gland | | | | | | | |
| Tongue | 4 | 2 | 4 | 4 | 3 | 5 | 5 |
| Tonsil | 4 | 3 | 4 | 4 | 4 | 5 | 5 |
| Trachea | 4 | 3 | 5 | 4 | 3 | 5 | 5 |
| Trigeminal | 5 | 3 | 2 | 5 | 4 | 3 | 4 |
| ganglia | | | | | | | |
| Urethra | 5 | 2 | 4 | 6 | 5 | 6 | 5 |
| Vagina | 4 | 2 | 4 | 4 | 2 | 6 | 5 |
| Vulva | 4 | 5 | 4 | 4 | 3 | 6 | 6 |

TABLE 24
Affymetrix array scores of additional markers in normal tissues.

| Tissue | IVNS1ABP | SPP1 | DKFZp762E1312 | WFDC2 | KIAA1892 | C6orf69 | KIBRA |
|---|---|---|---|---|---|---|---|
| Adipose | 4 | 5 | 3 | 4 | 5 | 6 | 4 |
| tissue | | | | | | | |
| Adrenal | 4 | 3 | 3 | 3 | 7 | 6 | 4 |
| gland | | | | | | | |
| cortex | | | | | | | |
| Bone | 6 | 5 | 5 | 4 | 8 | 5 | 4 |
| marrow | | | | | | | |
| Bronchus | 5 | 5 | 3 | 7 | 5 | 5 | 5 |
| Cerebellum | 4 | 6 | 3 | 4 | 5 | 5 | 5 |
| Cerebral | 5 | 8 | 3 | 4 | 5 | 5 | 5 |
| cortex | | | | | | | |
| Cerebrum | 5 | 8 | 3 | 4 | 5 | 5 | 6 |
| Cervix | 5 | 6 | 3 | 5 | 6 | 6 | 4 |
| Colon | 4 | 5 | 4 | 4 | 5 | 5 | 4 |
| cecum | | | | | | | |
| Coronary | 5 | 5 | 3 | 4 | 5 | 5 | 4 |
| artery | | | | | | | |
| Endo- | 5 | 5 | 4 | 6 | 6 | 5 | 5 |
| metrium | | | | | | | |
| Esophagus | 4 | 3 | 4 | 4 | 6 | 6 | 5 |
| Heart | 4 | 4 | 3 | 3 | 5 | 5 | 4 |
| atrium | | | | | | | |
| Heart | 5 | 3 | 3 | 4 | 5 | 5 | 4 |
| ventricle | | | | | | | |
| Kidney | 6 | 9 | 3 | 5 | 5 | 5 | 6 |
| cortex | | | | | | | |
| Kidney | 6 | 9 | 3 | 5 | 6 | 5 | 6 |
| medulla | | | | | | | |
| Liver | 4 | 5 | 3 | 3 | 5 | 6 | 5 |
| Lung | 5 | 5 | 3 | 5 | 5 | 6 | 5 |
| Lymph | 5 | 4 | 3 | 4 | 6 | 6 | 4 |
| nodes | | | | | | | |
| Mammary | 5 | 6 | 4 | 5 | 5 | 6 | 5 |
| gland | | | | | | | |
| Medulla | 5 | 9 | 3 | 3 | 5 | 5 | 6 |
| Midbrain | 5 | 9 | 3 | 4 | 5 | 5 | 5 |
| Myo- | 4 | 4 | 3 | 4 | 5 | 5 | 3 |
| metrium | | | | | | | |
| Nipple | 4 | 3 | 3 | 5 | 5 | 6 | 5 |
| cross | | | | | | | |
| section | | | | | | | |
| Oral | 4 | 3 | 4 | 4 | 5 | 6 | 6 |
| mucosa | | | | | | | |
| Ovary | 5 | 4 | 4 | 4 | 5 | 6 | 4 |
| Pharyngeal | 5 | 3 | 4 | 5 | 6 | 6 | 5 |
| mucosa | | | | | | | |
| Pituitary | 5 | 4 | 4 | 6 | 5 | 5 | 5 |
| gland | | | | | | | |
| Prostate | 5 | 5 | 3 | 5 | 5 | 5 | 6 |
| gland | | | | | | | |
| Salivary | 5 | 4 | 3 | 7 | 5 | 5 | 4 |
| gland | | | | | | | |
| Saphenous | 4 | 3 | 3 | 5 | 5 | 6 | 4 |
| vein | | | | | | | |
| Skeletal | 4 | 3 | 4 | 4 | 5 | 5 | 4 |
| muscle | | | | | | | |
| Spinal cord | 5 | 9 | 3 | 4 | 5 | 5 | 6 |
| Spleen | 5 | 3 | 3 | 3 | 5 | 6 | 4 |
| Stomach | 5 | 4 | 4 | 4 | 5 | 5 | 5 |
| Testes | 5 | 3 | 5 | 4 | 6 | 4 | 4 |
| Thyroid | 5 | 4 | 3 | 6 | 5 | 5 | 6 |
| gland | | | | | | | |
| Tongue | 5 | 4 | 4 | 6 | 5 | 5 | 5 |
| Tonsil | 5 | 3 | 4 | 4 | 5 | 5 | 4 |
| Trachea | 5 | 5 | 3 | 8 | 5 | 5 | 5 |
| Trigeminal | 5 | 7 | 3 | 6 | 5 | 6 | 4 |
| ganglia | | | | | | | |
| Urethra | 5 | 4 | 3 | 4 | 5 | 6 | 4 |
| Vagina | 5 | 4 | 4 | 4 | 5 | 5 | 4 |
| Vulva | 5 | 3 | 4 | 4 | 5 | 5 | 5 |

TABLE 25
Affymetrix array scores of additional markers in tumor tissues.

| | | SCGB- | | | | | |
|---|---|---|---|---|---|---|---|
| Tissue | c6orf55 | 2A1 | DSG2 | EPSTI1 | SEC-23B | MS4A6A | LOC51136 |
| Adrenal | 6 | 3 | 7 | 7 | 6 | 8 | 5 |
| gland | | | | | | | |
| Bladder | 5 | 3 | 7 | 5 | 5 | 5 | 4 |
| Brain | 5 | 6 | 5 | 5 | 5 | 5 | 3 |
| Breast | 6 | 6 | 7 | 5 | 6 | 6 | 5 |
| Cervix | 5 | 5 | 7 | 5 | 6 | 5 | 4 |
| Colon | 6 | 5 | 8 | 6 | 6 | 6 | 4 |
| Corpus | 6 | 8 | 7 | 5 | 6 | 6 | 4 |
| uteri | | | | | | | |
| Endo- | 5 | 9 | 7 | 5 | 6 | 5 | 4 |
| metrium | | | | | | | |
| Esophagus | 5 | 2 | 5 | 5 | 5 | 5 | 3 |
| Kidney | 5 | 3 | 7 | 5 | 6 | 6 | 4 |
| Liver | 5 | 3 | 7 | 6 | 6 | 6 | 5 |
| Lung | 5 | 5 | 7 | 6 | 6 | 6 | 4 |
| Omentum | 6 | 8 | 7 | 6 | 6 | 6 | 4 |
| Ovary | 6 | 8 | 7 | 6 | 6 | 6 | 4 |
| Pancreas | 5 | 6 | 6 | 6 | 6 | 6 | 3 |
| Prostate | 5 | 4 | 6 | 4 | 6 | 5 | 4 |
| Recto- | 5 | 4 | 8 | 6 | 6 | 6 | 4 |
| sigmoid | | | | | | | |
| Small | 5 | 6 | 6 | 5 | 6 | 5 | 4 |
| intestine | | | | | | | |
| Stomach | 5 | 4 | 7 | 5 | 6 | 5 | 4 |
| Testis | 5 | 2 | 4 | 7 | 6 | 8 | 4 |
| Thyroid | 5 | 4 | 7 | 5 | 5 | 5 | 4 |
| Vulva | 6 | 2 | 6 | 5 | 6 | 5 | 4 |

TABLE 26
Affymetrix array scores of additional markers in tumor tissues.

| Tissue | EGFL6 | KCNE3 | KCNE4 | C14orf-100 | C2orf6 | KCNK5 | C14orf28 |
|---|---|---|---|---|---|---|---|
| Adrenal | 3 | 7 | 5 | 7 | 5 | 5 | 3 |
| gland | | | | | | | |
| Bladder | 5 | 4 | 3 | 5 | 4 | 3 | 3 |
| Brain | 5 | 5 | 3 | 5 | 3 | 3 | 2 |
| Breast | 5 | 5 | 5 | 6 | 4 | 4 | 3 |
| Cervix | 5 | 5 | 4 | 5 | 4 | 3 | 3 |
| Colon | 4 | 6 | 3 | 6 | 4 | 4 | 3 |
| Corpus | 7 | 5 | 4 | 6 | 4 | 3 | 3 |
| uteri | | | | | | | |
| Endo- | 5 | 6 | 4 | 6 | 4 | 4 | 3 |
| metrium | | | | | | | |
| Esophagus | 3 | 6 | 3 | 5 | 3 | 3 | 2 |
| Kidney | 3 | 7 | 4 | 6 | 4 | 4 | 3 |
| Liver | 4 | 6 | 4 | 6 | 4 | 4 | 3 |
| Lung | 6 | 6 | 4 | 6 | 4 | 4 | 3 |
| Omentum | 6 | 5 | 4 | 6 | 4 | 4 | 3 |
| Ovary | 5 | 6 | 4 | 6 | 5 | 4 | 3 |
| Pancreas | 4 | 5 | 5 | 6 | 4 | 4 | 3 |
| Prostate | 3 | 4 | 3 | 6 | 4 | 3 | 3 |
| Recto- | 5 | 7 | 4 | 6 | 4 | 5 | 3 |
| sigmoid | | | | | | | |
| Small | 5 | 5 | 3 | 6 | 4 | 4 | 3 |
| intestine | | | | | | | |
| Stomach | 3 | 7 | 4 | 6 | 4 | 4 | 3 |
| Testis | 3 | 5 | 3 | 6 | 5 | 4 | 3 |
| Thyroid | 5 | 5 | 4 | 6 | 4 | 4 | 3 |
| Vulva | 5 | 5 | 3 | 5 | 4 | 3 | 3 |

TABLE 27
Affymetrix array scores of additional markers in tumor tissues.

| Tissue | PCDHB2 | FZD10 | ST14 | OLFML2B | GPR105 | SDC1 | FLJ46072 |
|---|---|---|---|---|---|---|---|
| Adrenal | 6 | 2 | 6 | 7 | 4 | 7 | 6 |
| gland | | | | | | | |
| Bladder | 5 | 3 | 5 | 5 | 3 | 7 | 6 |
| Brain | 6 | 3 | 4 | 4 | 2 | 5 | 5 |
| Breast | 5 | 3 | 5 | 6 | 4 | 7 | 6 |
| Cervix | 5 | 5 | 5 | 5 | 3 | 7 | 6 |
| Colon | 5 | 4 | 6 | 5 | 4 | 6 | 6 |
| Corpus | 5 | 6 | 5 | 7 | 3 | 5 | 5 |
| uteri | | | | | | | |
| Endo- | 5 | 5 | 5 | 5 | 3 | 6 | 6 |
| metrium | | | | | | | |
| Esophagus | 5 | 2 | 5 | 5 | 3 | 6 | 5 |
| Kidney | 6 | 2 | 4 | 5 | 4 | 6 | 5 |
| Liver | 5 | 3 | 6 | 6 | 3 | 7 | 6 |
| Lung | 6 | 4 | 5 | 6 | 4 | 7 | 6 |
| Omentum | 5 | 5 | 5 | 6 | 3 | 6 | 6 |
| Ovary | 5 | 5 | 5 | 5 | 3 | 6 | 6 |
| Pancreas | 6 | 2 | 5 | 6 | 4 | 6 | 5 |
| Prostate | 4 | 3 | 5 | 4 | 3 | 5 | 5 |
| Recto- | 5 | 4 | 6 | 6 | 5 | 6 | 6 |
| sigmoid | | | | | | | |
| Small | 5 | 4 | 5 | 4 | 3 | 5 | 5 |
| intestine | | | | | | | |
| Stomach | 6 | 3 | 5 | 5 | 6 | 6 | 6 |
| Testis | 4 | 2 | 3 | 6 | 6 | 4 | 4 |
| Thyroid | 5 | 3 | 4 | 4 | 4 | 6 | 5 |
| Vulva | 5 | 4 | 5 | 6 | 3 | 8 | 6 |

TABLE 28
Affymetrix array scores of additional markers in tumor tissues.

| Tissue | IVNS1ABP | SPP1 | DKFZp762E1312 | WFDC2 | KIAA1892 | C6orf69 | KIBRA |
|---|---|---|---|---|---|---|---|
| Adrenal | 7 | 9 | 6 | 6 | 6 | 7 | 5 |
| gland | | | | | | | |
| Bladder | 5 | 7 | 4 | 6 | 5 | 6 | 4 |
| Brain | 5 | 6 | 3 | 6 | 5 | 6 | 5 |
| Breast | 5 | 8 | 4 | 6 | 6 | 6 | 5 |
| Cervix | 6 | 7 | 4 | 6 | 5 | 6 | 4 |
| Colon | 6 | 7 | 4 | 6 | 6 | 6 | 5 |
| Corpus | 6 | 7 | 5 | 7 | 6 | 6 | 5 |
| uteri | | | | | | | |
| Endo- | 6 | 8 | 4 | 8 | 6 | 6 | 5 |
| metrium | | | | | | | |
| Esophagus | 5 | 6 | 4 | 5 | 4 | 5 | 4 |
| Kidney | 7 | 9 | 3 | 6 | 5 | 6 | 6 |
| Liver | 6 | 9 | 4 | 6 | 6 | 6 | 5 |
| Lung | 6 | 8 | 4 | 7 | 6 | 6 | 5 |
| Omentum | 6 | 8 | 5 | 7 | 6 | 6 | 5 |
| Ovary | 6 | 8 | 5 | 8 | 6 | 6 | 5 |
| Pancreas | 5 | 7 | 3 | 5 | 5 | 6 | 5 |
| Prostate | 5 | 5 | 3 | 5 | 5 | 6 | 6 |
| Recto- | 6 | 8 | 4 | 6 | 6 | 6 | 5 |
| sigmoid | | | | | | | |
| Small | 5 | 7 | 4 | 5 | 5 | 6 | 4 |
| intestine | | | | | | | |
| Stomach | 5 | 7 | 4 | 4 | 5 | 6 | 5 |
| Testis | 7 | 6 | 4 | 5 | 7 | 6 | 4 |
| Thyroid | 6 | 7 | 3 | 6 | 5 | 5 | 5 |
| Vulva | 6 | 7 | 4 | 4 | 6 | 6 | 4 |

[0430] Thus, TVM of the present invention are enriched in a wide variety of tumor cells. These findings further validate the TVM identified in the present invention, and demonstrate that the TVM are relevant in general to tumor cells. Further, the results show that diagnostic, localization, and therapeutic methods based on TVM of the present invention are not limited to ovarian tumors, but rather are applicable to all solid tumors.

What is claimed is:

1. A method of localizing an ovarian tumor vasculature in a subject, the method comprising the steps of:
a. contacting said subject with a ligand that binds a nucleic acid molecule, or that binds a protein encoded by said nucleic acid molecule, wherein the sequence of said nucleic acid molecule is set forth in SEQ ID No: 69; and
b. localizing said ligand,
thereby localizing an ovarian tumor vasculature in a subject.

2. A method of treating an ovarian tumor in a subject, the method comprising the steps of localizing said solid tumor by the method of claim 1 and irradiating said solid tumor, thereby treating an ovarian tumor in a subject.

3. A method of treating an ovarian tumor in a subject, the method comprising the steps of:
a. contacting said subject with a photoactivatable cytotoxic drug or pharmaceutical composition;
b. localizing said solid tumor by the method of claim 1; and
c. contacting said solid tumor with a concentrated light source,
thereby treating an ovarian tumor in a subject.

4. A method of localizing an ovarian tumor vasculature in a subject, the method comprising the steps of:
a. contacting said subject with a ligand that binds a nucleic acid molecule, or that binds a protein encoded by said nucleic acid molecule, wherein the sequence of said nucleic acid molecule is set forth in SEQ ID No: 1; and
b. localizing said ligand,
thereby localizing an ovarian tumor vasculature in a subject.

5. A method of treating an ovarian tumor in a subject, the method comprising the steps of localizing said solid tumor by the method of claim 4 and irradiating said solid tumor, thereby treating an ovarian tumor in a subject.

6. A method of treating an ovarian tumor in a subject, the method comprising the steps of:
a. contacting said subject with a photoactivatable cytotoxic drug or pharmaceutical composition;
b. localizing said solid tumor by the method of claim 4; and
c. contacting said solid tumor with a concentrated light source,
thereby treating an ovarian tumor in a subject.

7. A method of localizing an ovarian tumor vasculature in a subject, the method comprising the steps of:
a. contacting said subject with a ligand that binds a nucleic acid molecule, or that binds a protein encoded by said nucleic acid molecule, wherein the sequence of said nucleic acid molecule is set forth in SEQ ID No: 119; and
b. localizing said ligand,
thereby localizing an ovarian tumor vasculature in a subject.

8. A method of treating an ovarian tumor in a subject, the method comprising the steps of localizing said solid tumor by the method of claim 7 and irradiating said solid tumor, thereby treating an ovarian tumor in a subject.

9. A method of treating an ovarian tumor in a subject, the method comprising the steps of:
a. contacting said subject with a photoactivatable cytotoxic drug or pharmaceutical composition;
b. localizing said solid tumor by the method of claim 7; and
c. contacting said solid tumor with a concentrated light source,
thereby treating an ovarian tumor in a subject.

10. A method of localizing an ovarian tumor vasculature in a subject, the method comprising the steps of:
a. contacting said subject with a ligand that binds a nucleic acid molecule, or that binds a protein encoded by said nucleic acid molecule, wherein the sequence of said nucleic acid molecule is set forth in SEQ ID No: 106; and
b. localizing said ligand,
thereby localizing an ovarian tumor vasculature in a subject.

11. A method of treating an ovarian tumor in a subject, the method comprising the steps of localizing said solid tumor by the method of claim 10 and irradiating said solid tumor, thereby treating an ovarian tumor in a subject.

12. A method of treating an ovarian tumor in a subject, the method comprising the steps of:
a. contacting said subject with a photoactivatable cytotoxic drug or pharmaceutical composition;
b. localizing said solid tumor by the method of claim 10; and
c. contacting said solid tumor with a concentrated light source,
thereby treating an ovarian tumor in a subject.

13. A method of localizing an ovarian tumor vasculature in a subject, the method comprising the steps of:
a. contacting said subject with a ligand that binds a nucleic acid molecule, or that binds a protein encoded by said nucleic acid molecule, wherein the sequence of said nucleic acid molecule is set forth in SEQ ID No: 58; and
b. localizing said ligand,
thereby localizing an ovarian tumor vasculature in a subject.

14. A method of treating an ovarian tumor in a subject, the method comprising the steps of localizing said solid tumor by the method of claim 13 and irradiating said solid tumor, thereby treating an ovarian tumor in a subject.

15. A method of treating an ovarian tumor in a subject, the method comprising the steps of:
a. contacting said subject with a photoactivatable cytotoxic drug or pharmaceutical composition;
b. localizing said solid tumor by the method of claim 13; and
c. contacting said solid tumor with a concentrated light source,
thereby treating an ovarian tumor in a subject.

16. A method of localizing a renal tumor vasculature in a subject, the method comprising the steps of:
a. contacting said subject with a ligand that binds a nucleic acid molecule, or that binds a protein encoded by said nucleic acid molecule, wherein the sequence of said nucleic acid molecule is set forth in SEQ ID No: 30; and
b. localizing said ligand,
thereby localizing a renal tumor vasculature in a subject.

17. A method of treating a renal tumor in a subject, the method comprising the steps of localizing said solid tumor by the method of claim 16 and irradiating said solid tumor, thereby treating a renal tumor in a subject.

18. A method of treating a renal tumor in a subject, the method comprising the steps of:
a. contacting said subject with a photoactivatable cytotoxic drug or pharmaceutical composition;
b. localizing said solid tumor by the method of claim 16; and
c. contacting said solid tumor with a concentrated light source,
thereby treating a renal tumor in a subject.

19. A method of localizing an ovarian tumor vasculature in a subject, the method comprising the steps of:
a. contacting said subject with a ligand that binds a nucleic acid molecule, or that binds a protein encoded by said nucleic acid molecule, wherein the sequence of said nucleic acid molecule is set forth in SEQ ID No: 27; and
b. localizing said ligand,
thereby localizing an ovarian tumor vasculature in a subject.

20. A method of treating an ovarian tumor in a subject, the method comprising the steps of localizing said solid tumor by the method of claim 19 and irradiating said solid tumor, thereby treating an ovarian tumor in a subject.

21. A method of treating an ovarian tumor in a subject, the method comprising the steps of:
a. contacting said subject with a photoactivatable cytotoxic drug or pharmaceutical composition;
b. localizing said solid tumor by the method of claim 19; and
c. contacting said solid tumor with a concentrated light source,
thereby treating an ovarian tumor in a subject.

22. A method of localizing an ovarian tumor vasculature in a subject, the method comprising the steps of:
a. contacting said subject with a ligand that binds a nucleic acid molecule, or that binds a protein encoded by said nucleic acid molecule, wherein the sequence of said nucleic acid molecule is set forth in SEQ ID No: 37; and
b. localizing said ligand,
thereby localizing an ovarian tumor vasculature in a subject.

23. A method of treating an ovarian tumor in a subject, the method comprising the steps of localizing said solid tumor by the method of claim 22 and irradiating said solid tumor, thereby treating an ovarian tumor in a subject.

24. A method of treating an ovarian tumor in a subject, the method comprising the steps of:
a. contacting said subject with a photoactivatable cytotoxic drug or pharmaceutical composition;
b. localizing said solid tumor by the method of claim 22; and
c. contacting said solid tumor with a concentrated light source,
thereby treating an ovarian tumor in a subject.

25. A method of localizing a breast cancer tumor vasculature in a subject, the method comprising the steps of:
a. contacting said subject with a ligand that binds a nucleic acid molecule, or that binds a protein encoded by said nucleic acid molecule, wherein the sequence of said nucleic acid molecule is set forth in SEQ ID No: 21; and
b. localizing said ligand,
thereby localizing a breast cancer tumor vasculature in a subject.

26. A method of treating a breast cancer tumor in a subject, the method comprising the steps of localizing said solid tumor by the method of claim 25 and irradiating said solid tumor, thereby treating a breast cancer tumor in a subject.

27. A method of treating a breast cancer tumor in a subject, the method comprising the steps of:
a. contacting said subject with a photoactivatable cytotoxic drug or pharmaceutical composition;
b. localizing said solid tumor by the method of claim 25; and
c. contacting said solid tumor with a concentrated light source,
thereby treating a breast cancer tumor in a subject.

28. A method of localizing an ovarian tumor vasculature in a subject, the method comprising the steps of:
a. contacting said subject with a ligand that binds a nucleic acid molecule, or that binds a protein encoded by said nucleic acid molecule, wherein the sequence of said nucleic acid molecule is set forth in SEQ ID No: 68; and
b. localizing said ligand,
thereby localizing an ovarian tumor vasculature in a subject.

29. A method of treating an ovarian tumor in a subject, the method comprising the steps of localizing said solid tumor by the method of claim 28 and irradiating said solid tumor, thereby treating an ovarian tumor in a subject.

30. A method of treating an ovarian tumor in a subject, the method comprising the steps of:
a. contacting said subject with a photoactivatable cytotoxic drug or pharmaceutical composition;
b. localizing said solid tumor by the method of claim 28; and
c. contacting said solid tumor with a concentrated light source,
thereby treating an ovarian tumor in a subject.

31. A method of localizing an ovarian tumor vasculature in a subject, the method comprising the steps of:
a. contacting said subject with a ligand that binds a nucleic acid molecule, or that binds a protein encoded by said nucleic acid molecule, wherein the sequence of said nucleic acid molecule is set forth in SEQ ID No: 2; and
b. localizing said ligand,
thereby localizing an ovarian tumor vasculature in a subject.

32. A method of treating an ovarian tumor in a subject, the method comprising the steps of localizing said solid tumor by the method of claim 31 and irradiating said solid tumor, thereby treating an ovarian tumor in a subject.

33. A method of treating an ovarian tumor in a subject, the method comprising the steps of:
a. contacting said subject with a photoactivatable cytotoxic drug or pharmaceutical composition;
b. localizing said solid tumor by the method of claim 31; and
c. contacting said solid tumor with a concentrated light source,
thereby treating an ovarian tumor in a subject.

34. A method of localizing an ovarian tumor vasculature in a subject, the method comprising the steps of:
a. contacting said subject with a ligand that binds a nucleic acid molecule, or that binds a protein encoded by said nucleic acid molecule, said nucleic acid molecule having a sequence selected from the sequences set forth in SEQ ID No: 13, 14, 26, 35, 39, 42, 43, 47, 104, 108, 111, 113, 116, 118, 121, 127, 130, 132, 134, 146, 152, 165, 169, 170, 179, and 181,
b. localizing said ligand,
thereby localizing an ovarian tumor vasculature in a subject.

35. A method of treating an ovarian tumor in a subject, the method comprising the steps of localizing said solid tumor by the method of claim 34 and irradiating said solid tumor, thereby treating an ovarian tumor in a subject.

36. A method of treating an ovarian tumor in a subject, the method comprising the steps of:
a. contacting said subject with a photoactivatable cytotoxic drug or pharmaceutical composition;
b. localizing said solid tumor by the method of claim 34; and
c. contacting said solid tumor with a concentrated light source,
thereby treating an ovarian tumor in a subject.

37. A method of treating an ovarian tumor in a subject, the method comprising the step of contacting said solid tumor with an antibody or ligand that is conjugated to a cytotoxic agent or cytotoxic drug and that binds a nucleic acid molecule or a protein encoded by said nucleic acid molecule, wherein the sequence of said nucleic acid molecule is selected from the sequences set forth in SEQ ID No: 1, 2, 13, 14, 26, 27, 35, 37, 39, 42, 43, 47, 58, 68, 69, 104, 106, 108, 111, 113, 116, 118, 119, 121, 127, 130, 132, 134, 146, 152, 165, 169, 170, 179, and 181, thereby treating an ovarian tumor in a subject.

38. The method of claim 37, wherein said cytotoxic agent is a radioactive isotope.

39. The method of claim 37, wherein said cytotoxic agent is a nucleic acid molecule.

40. The method of claim 37, wherein said cytotoxic agent is an antisense nucleotide, or RNA inhibitory molecule.

41. The method of claim 37, wherein said cytotoxic agent is a cytotoxic virus or pathogen.

42. The method of claim 37, wherein said cytotoxic agent is a nanoparticle.

43. The method of claim 37, wherein said cytotoxic agent is an engineered T cell or an engineered cytotoxic cell.

44. A method of treating a renal tumor in a subject, the method comprising the step of contacting said solid tumor with an antibody or ligand that is conjugated to a cytotoxic agent or cytotoxic drug and that binds a nucleic acid molecule or a protein encoded by said nucleic acid molecule, wherein the sequence of said nucleic acid molecule is set forth in SEQ ID No: 30, thereby treating a renal tumor in a subject.

45. The method of claim 44, wherein said cytotoxic agent is a radioactive isotope.

46. The method of claim 44, wherein said cytotoxic agent is a nucleic acid molecule.

47. The method of claim 44, wherein said cytotoxic agent is an antisense nucleotide, or RNA inhibitory molecule.

48. The method of claim 44, wherein said cytotoxic agent is a cytotoxic virus or pathogen.

49. The method of claim 44, wherein said cytotoxic agent is a nanoparticle.

50. The method of claim 44, wherein said cytotoxic agent is an engineered T cell or an engineered cytotoxic cell.

51. A method of treating a breast cancer tumor in a subject, the method comprising the step of contacting said solid tumor with an antibody or ligand that is conjugated to a cytotoxic agent or cytotoxic drug and that binds a nucleic acid molecule or a protein encoded by said nucleic acid molecule, wherein the sequence of said nucleic acid molecule is set forth in SEQ ID No: 21, thereby treating a breast cancer tumor in a subject.

52. The method of claim 51, wherein said cytotoxic agent is a radioactive isotope.

53. The method of claim 51, wherein said cytotoxic agent is a nucleic acid molecule.

54. The method of claim 51, wherein said cytotoxic agent is an antisense nucleotide, or RNA inhibitory molecule.

55. The method of claim 51, wherein said cytotoxic agent is a cytotoxic virus or pathogen.

56. The method of claim 51, wherein said cytotoxic agent is a nanoparticle.

57. The method of claim 51, wherein said cytotoxic agent is an engineered T cell or an engineered cytotoxic cell.

58. A method of impeding a vascularization of an ovarian tumor in a subject, the method comprising the step of contacting said subject with a ligand capable of inhibiting an activity of a nucleic acid molecule or a protein encoded by said nucleic acid molecule wherein the sequence of said nucleic acid molecule is selected from the sequences set forth in SEQ ID No: 1, 2, 13, 14, 26, 27, 35, 37, 39, 42, 43, 47, 58, 68, 69, 104, 106, 108, 111, 113, 116, 118, 119, 121, 127, 130, 132, 134, 146, 152, 165, 169, 170, 179, and 181, whereby said ligand is taken up by a vasculature cell of said ovarian tumor, thereby impeding a vascularization of a solid tumor in a subject.

59. The method of claim 58, wherein said ligand is an antisense or RNA inhibitory molecule.

60. A method of impeding a vascularization of a renal tumor in a subject, the method comprising the step of contacting said subject with a ligand capable of inhibiting an activity of a nucleic acid molecule or a protein encoded by said nucleic acid molecule wherein the sequence of said nucleic acid molecule is set forth in SEQ ID No: 30, whereby said ligand is taken up by a vasculature cell of said renal tumor, thereby impeding a vascularization of a solid tumor in a subject.

61. The method of claim 60, wherein said ligand is an antisense or RNA inhibitory molecule.

62. A method of impeding a vascularization of a breast cancer tumor in a subject, the method comprising the step of contacting said subject with a ligand capable of inhibiting an activity of a nucleic acid molecule or a protein encoded by said nucleic acid molecule wherein the sequence of said nucleic acid molecule is set forth in SEQ ID No: 21, whereby said ligand is taken up by a vasculature cell of said breast cancer tumor, thereby impeding a vascularization of a solid tumor in a subject.

63. The method of claim 62, wherein said ligand is an antisense or RNA inhibitory molecule.

64. A method of detecting a presence of an ovarian tumor in a subject, the method comprising the step of detecting a presence in a body fluid of said subject of a protein encoded by a nucleotide molecule, wherein the sequence of said nucleotide molecule is set forth in SEQ ID No: 2, whereby said presence in a body fluid of said protein indicates said presence of an ovarian tumor in said subject.

65. A method of detecting a presence of an ovarian tumor in a subject, the method comprising the step of detecting a presence in a body fluid of said subject of a nucleotide molecule, wherein the sequence of said nucleotide molecule is set forth in SEQ ID No: 2, whereby said presence in a body fluid of said nucleotide molecule indicates said presence of an ovarian tumor in said subject.

66. A method of detecting a presence of an ovarian tumor in a subject, the method comprising the step of detecting a presence in a body fluid of said subject of a protein encoded by a nucleotide molecule, wherein the sequence of said nucleotide molecule is set forth in SEQ ID No: 69, whereby said presence in a body fluid of said protein indicates said presence of an ovarian tumor in said subject.

67. A method of detecting a presence of an ovarian tumor in a subject, the method comprising the step of detecting a presence in a body fluid of said subject of a nucleotide molecule, wherein the sequence of said nucleotide molecule is set forth in SEQ ID No: 69, whereby said presence in a body fluid of said nucleotide molecule indicates said presence of an ovarian tumor in said subject.

68. A method of detecting a presence of an ovarian tumor vasculature cell in a subject, the method comprising the step of:
detecting a presence in a body fluid of said subject of a protein encoded by a nucleotide molecule selected from SEQ ID No: 14, 35, 42, 68, 121, 127, 169, 179, and 181,
whereby said presence in a body fluid of said protein indicates said presence of an ovarian tumor vasculature cell in said subject.

69. A method of detecting a presence of an ovarian tumor vasculature cell in a subject, the method comprising the step of:
detecting a presence in a body fluid of said subject of a nucleotide molecule selected from SEQ ID No: 14, 35, 42, 68, 121, 127, 169, 179, and 181,
whereby said presence in a body fluid of said nucleotide molecule indicates said presence of an ovarian tumor vasculature cell in said subject.

70. A method of detecting a presence of a breast cancer vasculature cell in a subject, the method comprising the step of:
detecting a presence in a body fluid of said subject of a protein encoded by a SEQ ID No: 21,
whereby said presence in a body fluid of said protein indicates said presence of a breast cancer vasculature cell in said subject.

71. A method of detecting a presence of a breast cancer vasculature cell in a subject, the method comprising the step of:
detecting a presence in a body fluid of said subject of a nucleotide molecule, wherein the sequence of said nucleotide molecule is set forth in SEQ ID No: 21,
whereby said presence in a body fluid of said nucleotide molecule indicates said presence of a breast cancer vasculature cell in said subject.

72. A peptide with the amino acid sequence CPGAKALSRVREDIVEDE (SEQ ID No: 88).

73. An antibody that recognizes the peptide of claim 72.

74. Use of the peptide of claim 72 in the detection of an ovarian tumor or tumor vasculature.

75. Use of the peptide of claim 72 in the localization of an ovarian tumor or tumor vasculature.

76. Use of the peptide of claim 72 in the treatment of an ovarian tumor or tumor vasculature.

The application's sequence listing, which the Patent Office published only in electronic form, follows.

SEQUENCE LISTING (269 sequences)

SEQ ID NO: 1 - DNA, 5062 bp, Homo sapiens
cactaacgctcttcctagtccccgggccaactcggacagtttgctcatttattgcaacggtcaaggctggcttgtgccagaacggcgcgcgcgcgacgcacgcacacacacggggggaaacttttttaaaaatgaaaggctagaagagctcagcggcggcgcgggccgtgcgcgagggctccggagctgactcgccgaggcaggaaatccctccggtcgcgacgcccggccccgctcggcgcccgcgtgggatggtgcagcgctcgccgccgggcccgagagctgctgcactgaaggccggcgacgatggcagcgcgcccgctgcccgtgtcccccgcccgcgccctcctgctcgccctggccggtgctctgctcgcgccctgcgaggcccgaggggtgagcttatggaaccaaggaagagctgatgaagttgtcagtgcctctgttcggagtggggacctctggatcccagtgaagagcttcgactccaagaatcatccagaagtgctgaatattcgactacaacgggaaagcaaagaactgatcataaatctggaaagaaatgaaggtctcattgccagcagtttcacggaaacccactatctgcaagacggtactgatgtctccctcgctcgaaattacacggtaattctgggtcactgttactaccatggacatgtacggggatattctgattcagcagtcagtctcagcacgtgttctggtctcaggggacttattgtgtttgaaaatgaaagctatgtcttagaaccaatgaaaagtgcaaccaacagatacaaactcttcccagcgaagaagctgaaaagcgtccggggatcatgtggatcacatcacaacacaccaaacctcgctgcaaagaatgtgtttccaccaccctctcagacatgggcaagaaggcataaaagagagaccctcaaggcaactaagtatgtggagctggtgatcgtggcagacaaccgagagtttcagaggcaaggaaaagatctggaaaaagttaagcagcgattaatagagattgctaatcacgttgacaagttttacagaccactgaacattcggatcgtgttggtaggcgtggaagtgtggaatgacatggacaaatgctctgtaagtcaggacccattcaccagcctccatgaatttctggactggaggaagatgaagcttctacctcgcaaatcccatgacaatgcgcagcttgtcagtggggtttatttccaagggaccaccatcggcatggccccaatcatgagcatgtgcacggcagaccagtctgggggaattgtcatggaccattcagacaatccccttggtgcagccgtgaccctggcacatgagctgggccacaatttcgggatgaatcatgacacactggacaggggctgtagctgtcaaatggcggttgagaaaggaggctgcatcatgaacgcttccaccgggtacccatttcccatggtgttcagcagttgcagcaggaaggacttggagaccagcctggagaaaggaatgggggtgtgcctgtttaacctgccggaagtcagggagtctttcgggggccagaagtgtgggaacagatttgtggaagaaggagaggagtgtgactgtggggagccagaggaatgtatgaatcgctgctgcaatgccaccacctgtaccctgaagccggacgctgtgtgcgcacatgggctgtgctgtgaagactgccagctgaagcctgcaggaacagcgtgcagggactccagcaactcctgtgacctcccagagttctgcacaggggccagccctcactgcccagccaacgtgtacctgcacgatgggcactcatgtcaggatgtggacggctactgctacaatggcatctgccagactcacgagcagcagtgtgtcacactctggggaccaggtgctaaacctgcccctgggatctgctttgagagagtcaattctgcaggtgatccttatggcaactgtggcaaagtctcgaagagttcctttgccaaatgcgagatgagagatgctaaatgtggaaaaatccagtgtcaaggaggtgccagccggccagtcattggtaccaatgccgtttccatagaaacaaacatccccctgcagcaaggaggccggattctgtgccgggggacccacgtgtacttgggcgatgacatgccggacccagggcttgtgcttgcaggcacaaagtgtgcagatggaaaaatctgcctgaatcgtcaatgtcaaaatattagtgtctttggggttcacgagtgtgcaatgcagtgccacggcagaggggtgtgcaacaacaggaagaactgccactgcgaggcccactgggcacctcccttctgtgacaagtttggctttggaggaagcacagacagcggccccatccggcaagcagataaccaaggtttaaccataggaattctggtgaccatcctgtgtcttcttgctgccggatttgtggtttatctcaaaaggaagaccttgatacgactgctgtttacaaataagaagaccaccattgaaaaactaaggtgtgtgcgcccttcccggccaccccgtggcttccaaccctgtcaggctcacctcggccaccttggaaaaggcctgatgaggaagccgccagattcctacccaccgaaggacaatcccaggagattgctgcagtgtcagaatgttgacatcagcagacccctcaacggcctgaatgtccctcagccccagtcaactcagcgagtgcttcctcccctccaccgggccccacgtgcacctagcgtccctgccagacccctgccagccaagcctgcacttaggcaggcccaggggacctgtaagccaaacccccctcagaagcctctgcctgcagatcctctggccagaacaactcggctcactcatgccttggccaggaccccaggacaatgggagactgggctccgcctggcacccctcagacctgctccacaatatccacaccaagtgcccagatccacccacaccgcctatattaagtgagaagccgacaccttttttcaacagtgaagacagaagtttgcactatctttcagctccagttggagttttttgtaccaacttttaggattttttttaatgtttaaaacatcattactataagaactttgagctactgccgtcagtgctgtgctgtgctatggtgctctgtctacttgcacaggtacttgtaaattattaatttatgcagaatgttgattacagtgcagtgcgctgtagtaggcatttttaccatcactgagttttccatggcaggaaggcttgttgtgcttttagtattttagtgaacttgaaatatcctgcttgatgggattctggacaggatgtgtttgctttctgatcaaggccttattggaaagcagtcccccaactacccccagctgtgcttatggtaccagatgcagctcaagagatcccaagtagaatctcagttgattttctggattccccatctcaggccagagccaaggggcttcaggtccaggctgtgtttggctttcagggaggccctgtgccccttgacaactggcaggcaggctcccagggacacctgggagaaatctggcttctggccaggaagctttggtgagaacctgggttgcagacaggaatcttaaggtgtagccacaccaggatagagactggaacactagacaagccagaacttgaccctgagctgaccagccgtgagcatgtttggaaggggtctgtagtgtcactcaaggcggtgcttgatagaaatgccaagcacttctttttctcgctgtcctttctagagcactgccaccagtaggttatttagcttgggaaaggtggtgtttctgtaagaaacctactgcccaggcactgcaaaccgccacctccctatactgcttggagctgagcaaatcaccacaaactgtaatacaatgatcctgtattcagacagatgaggactttccatgggaccacaactattttcagatgtgaaccattaaccagatctagtcaatcaagtctgtttactgcaaggttcaacttattaacaattaggcagactctttatgcttgcaaaaactacaaccaatggaatgtgatgttcatgggtatagttcatgtctgctatcattattcgtagatattggacaaagaaccttctctatggggcatcctctttttccaacttggctgcaggaatctttaaaagatgcttttaacagagtctgaacctatttcttaaacacttgcaacctacctgttgagcatcacagaatgtgataaggaaatcaacttgcttatcaacttcctaaatattatgagatgtggcttgggcagcatccccttgaactcttcactcttcaaatgcctgactagggagccatgtttcacaaggtctttaaagtgactaatggcatgagaaatacaaaaatactcagataaggtaaaatgccatgatgcctctgtcttctggactggttttcacattagaagacaattgacaacagttacataattcactctgagtgttttatgagaaagccttcttttggggtcaacagttttcctatgctttgaaacagaaaaatatgtaccaagaatcttggtttgccttccagaaaacaaaactgcatttcactttcccggtgttccccactgtatctaggcaacatagtattcatgactatggataaactaaacacgtgacacaaacacacacaaaagggaacccagctctaatacattccaactcgtatagcatgcatctgtttattctatagttattaagttctttaaaatgtaaagccatgctggaaaataatactgctgagatacatacagaattactgtaactgattacacttggtaattgtactaaagccaaacatatatatactattaaaaaggtttacagaattttatggtgcattacgtgggcattgtctttttagatgcccaaatccttagatctggcatgttagcccttcctccaattataagaggatatgaaccaaaaaaaaaaaaaaaaaaa

SEQ ID NO: 2 - DNA, 9645 bp, Homo sapiens
atgcccaagcgcgcgcactggggggccctctccgtggtgctgatcctgctttggggccatccgcgagtggcgctggcctgcccgcatccttgtgcctgctacgtccccagcgaggtccactgcacgttccgatccctggcttccgtgcccgctggcattgctagacacgtggaaagaatcaatttggggtttaatagcatacaggccctgtcagaaacctcatttgcaggactgaccaagttggagctacttatgattcacggcaatgagatcccaagcatccccgatggagctttaagagacctcagctctcttcaggttttcaagttcagctacaacaagctgagagtgatcacaggacagaccctccagggtctctctaacttaatgaggctgcacattgaccacaacaagatcgagtttatccaccctcaagctttcaacggcttaacgtctctgaggctactccatttggaaggaaatctcctccaccagctgcaccccagcaccttctccacgttcacatttttggattatttcagactctccaccataaggcacctctacttagcagagaacatggttagaactcttcctgccagcatgcttcggaacatgccgcttctggagaatctttacttgcagggaaatccgtggacctgcgattgtgagatgagatggtttttggaatgggatgcaaaatccagaggaattctgaagtgtaaaaaggacaaagcttatgaaggcggtcagttgtgtgcaatgtgcttcagtccaaagaagttgtacaaacatgagatacacaagctgaaggacatgacttgtctgaagccttcaatagagtcccctctgagacagaacaggagcaggagtattgaggaggagcaagaacaggaagaggatggtggcagccagctcatcctggagaaattccaactgccccagtggagcatctctttgaatatgaccgacgagcacgggaacatggtgaacttggtctgtgacatcaagaaaccaatggatgtgtacaagattcacttgaaccaaacggatcctccagatattgacataaatgcaacagttgccttggactttgagtgtccaatgacccgagaaaactatgaaaagctatggaaattgatagcatactacagtgaagttcccgtgaagctacacagagagctcatgctcagcaaagaccccagagtcagctaccagtacaggcaggatgctgatgaggaagctctttactacacaggtgtgagagcccagattcttgcagaaccagaatgggtcatgcagccatccatagatatccagctgaaccgacgtcagagtacggccaagaaggtgctactttcctactacacccagtattctcaaacaatatccaccaaagatacaaggcaggctcggggcagaagctgggtaatgattgagcctagtggagctgtgcaaagagatcagactgtcctggaagggggtccatgccagttgagctgcaacgtgaaagcttctgagagtccatctatcttctgggtgcttccagatggctccatcctgaaagcgcccatggatgacccagacagcaagttctccattctcagcagtggctggctgaggatcaagtccatggagccatctgactcaggcttgtaccagtgcattgctcaagtgagggatgaaatggaccgcatggtatatagggtacttgtgcagtctccctccactcagccagccgagaaagacacagtgacaattggcaagaacccaggggagtcggtgacattgccttgcaatgctttagcaatacccgaagcccaccttagctggattcttccaaacagaaggataattaatgatttggctaacacatcacatgtatacatgttgccaaatggaactctttccatcccaaaggtccaagtcagtgatagtggttactacagatgtgtggctgtcaaccagcaaggggcagaccattttacggtgggaatcacagtgaccaagaaagggtctggcttgccatccaaaagaggcagacgcccaggtgcaaaggctctttccagagtcagagaagacatcgtggaggatgaagggggctcgggcatgggagatgaagagaacacttcaaggagacttctgcatccaaaggaccaagaggtgttcctcaaaacaaaggatgatgccatcaatggagacaagaaagccaagaaagggagaagaaagctgaaactctggaagcattcggaaaaagaaccagagaccaatgttgcagaaggtcgcagagtgtttgaatctagacgaaggataaacatggcaaacaaacagattaatccggagcgctgggctgatattttagccaaagtccgtgggaaaaatctccctaagggcacagaagtacccccgttgattaaaaccacaagtcctccatccttgagcctagaagtcacaccaccttttcctgctgtttctcccccctcagcatctcctgtgcagacagtaaccagtgctgaagaatcctcagcagatgtacctctacttggtgaagaagagcacgttttgggtaccatttcctcagccagcatggggctagaacacaaccacaatggagttattcttgttgaacctgaagtaacaagcacacctctggaggaagttgttgatgacctttctgagaagactgaggagataacttccactgaaggagacctgaaggggacagcagcccctacacttatatctgagccttatgaaccatctcctactctgcacacattagacacagtctatgaaaagcccacccatgaagagacggcaacagagggttggtctgcagcagatgttggatcgtcaccagagcccacatccagtgagtatgagcctccattggatgctgtctccttggctgagtctgagcccatgcaatactttgacccagatttggagactaagtcacaaccagatgaggataagatgaaagaagacacctttgcacaccttactccaacccccaccatctgggttaatgactccagtacatcacagttatttgaggattctactataggggaaccaggtgtcccaggccaatcacatctacaaggactgacagacaacatccaccttgtgaaaagtagtctaagcactcaagacaccttactgattaaaaagggtatgaaagagatgtctcagacactacagggaggaaatatgctagagggagaccccacacactccagaagttctgagagtgagggccaagagagcaaatccatcactttgcctgactccacactgggtataatgagcagtatgtctccagttaagaagcctgcggaaaccacagttggtaccctcctagacaaagacaccacaacagtaacaacaacaccaaggcaaaaagttgctccgtcatccaccatgagcactcacccttctcgaaggagacccaacgggagaaggagattacgccccaacaaattccgccaccggcacaagcaaaccccacccacaacttttgccccatcagagactttttctactcaaccaactcaagcacctgacattaagatttcaagtcaagtggagagttctctggttcctacagcttgggtggataacacagttaatacccccaaacagttggaaatggagaagaatgcagaacccacatccaagggaacaccacggagaaaacacgggaagaggccaaacaaacatcgatataccccttctacagtgagctcaagagcgtccggatccaagcccagcccttctccagaaaataaacatagaaacattgttactcccagttcagaaactatacttttgcctagaactgtttctctgaaaactgagggcccttatgattccttagattacatgacaaccaccagaaaaatatattcatcttaccctaaagtccaagagacacttccagtcacatataaacccacatcagatggaaaagaaattaaggatgatgttgccacaaatgttgacaaacataaaagtgacattttagtcactggtgaatcaattactaatgccataccaacttctcgctccttggtctccactatgggagaatttaaggaagaatcctctcctgtaggctttccaggaactccaacctggaatccctcaaggacggcccagcctgggaggctacagacagacatacctgttaccacttctggggaaaatcttacagaccctccccttcttaaagagcttgaggatgtggatttcacttccgagtttttgtcctctttgacagtctccacaccatttcaccaggaagaagctggttcttccacaactctctcaagcataaaagtggaggtggcttcaagtcaggcagaaaccaccacccttgatcaagatcatcttgaaaccactgtggctattctcctttctgaaactagaccacagaatcacacccctactgctgcccggatgaaggagccagcatcctcgtccccatccacaattctcatgtctttgggacaaaccaccaccactaagccagcacttcccagtccaagaatatctcaagcatctagagattccaaggaaaatgttttcttgaattatgtggggaatccagaaacagaagcaaccccagtcaacaatgaaggaacacagcatatgtcagggccaaatgaattatcaacaccctcttccgaccgggatgcatttaacttgtctacaaagctggaattggaaaagcaagtatttggtagtaggagtctaccacgtggcccagatagccaacgccaggatggaagagttcatgcttctcatcaactaaccagagtccctgccaaacccatcctaccaacagcaacagtgaggctacctgaaatgtccacacaaagcgcttccagatactttgtaacttcccagtcacctcgtcactggaccaacaaaccggaaataactacatatccttctggggctttgccagagaacaaacagtttacaactccaagattatcaagtacaacaattcctctcccattgcacatgtccaaacccagcattcctagtaagtttactgaccgaagaactgaccaattcaatggttactccaaagtgtttggaaataacaacatccctgaggcaagaaacccagttggaaagcctcccagtccaagaattcctcattattccaatggaagactccctttctttaccaacaagactctttcttttccacagttgggagtcacccggagaccccagatacccacttctcctgccccagtaatgagagagagaaaagttattccaggttcctacaacaggatacattcccatagcaccttccatctggactttggccctccggcacctccgttgttgcacactccgcagaccacgggatcaccctcaactaacttacagaatatccctatggtctcttccacccagagttctatctcctttataacatcttctgtccagtcctcaggaagcttccaccagagcagctcaaagttctttgcaggaggacctcctgcatccaaattctggtctcttggggaaaagccccaaatcctcaccaagtccccacagactgtgtccgtcaccgctgagacagacactgtgttcccctgtgaggcaacaggaaaaccaaagcctttcgttacttggacaaaggtttccacaggagctcttatgactccgaataccaggatacaacggtttgaggttctcaagaacggtaccttagtgatacggaaggttcaagtacaagatcgaggccagtatatgtgcaccgccagcaacctgcacggcctggacaggatggtggtcttgctttcggtcaccgtgcagcaacctcaaatcctagcctcccactaccaggacgtcactgtctacctgggagacaccattgcaatggagtgtctggccaaagggaccccagccccccaaatttcctggatcttccctgacaggagggtgtggcaaactgtgtcccccgtggagagccgcatcaccctgcacgaaaaccggaccctttccatcaaggaggcgtccttctcagacagaggcgtctataagtgcgtggccagcaatgcagccggggcggacagcctggccatccgcctgcacgtggcggcactgccccccgttatccaccaggagaagctggagaacatctcgctgcccccggggctcagcattcacattcactgcactgccaaggctgcgcccctgcccagcgtgcgctgggtgctcggggacggtacccagatccgcccctcgcagttcctccacgggaacttgtttgttttccccaacgggacgctctacatccgcaacctcgcgcccaaggacagcgggcgctatgagtgcgtggccgccaacctggtaggctccgcgcgcaggacggtgcagctgaacgtgcagcgtgcagcagccaacgcgcgcatcacgggcacctccccgcggaggacggacgtcaggtacggaggaaccctcaagctggactgcagcgcctcgggggacccctggccgcgcatcctctggaggctgccgtccaagaggatgatcgacgcgctcttcagttttgatagcagaatcaaggtgtttgccaatgggaccctggtggtgaaatcagtgacggacaaagatgccggagattacctgtgcgtagctcgaaataaggttggtgatgactacgtggtgctcaaagtggatgtggtgatgaaaccggccaagattgaacacaaggaggagaacgaccacaaagtcttctacgggggtgacctgaaagtggactgtgtggccaccgggcttcccaatcccgagatctcctggagcctcccagacgggagtctggtgaactccttcatgcagtcggatgacagcggtggacgcaccaagcgctatgtcgtcttcaacaatgggacactctactttaacgaagtggggatgagggaggaaggagactacacctgctttgctgaaaatcaggtcgggaaggacgagatgagagtcagagtcaaggtggtgacagcgcccgccaccatccggaacaagacttacttggcggttcaggtgccctatggagacgtggtcactgtagcctgtgaggccaaaggagaacccatgcccaaggtgacttggttgtccccaaccaacaaggtgatccccacctcctctgagaagtatcagatataccaagatggcactctccttattcagaaagcccagcgttctgacagcggcaactacacctgcctggtcaggaacagcgcgggagaggataggaagacggtgtggattcacgtcaacgtccagccacccaagatcaacggtaaccccaaccccatcaccaccgtgcgggagatagcagccgggggcagtcggaaactgattgactgcaaagctgaaggcatccccaccccgagggtgttatgggcttttcccgagggtgtggttctgccagctccatactatggaaaccggatcactgtccatggcaacggttccctggacatcaggagtttgaggaagagcgactccgtccagctggtatgcatggcacgcaacgagggaggggaggcgaggttgatcgtgcagctcactgtcctggagcccatggagaaacccatcttccacgacccgatcagcgagaagatcacggccatggcgggccacaccatcagcctcaactgctctgccgcggggaccccgacacccagcctggtgtgggtccttcccaatggcaccgatctgcagagtggacagcagctgcagcgcttctaccacaaggctgacggcatgctacacattagcggtctctcctcggtggacgctggggcctaccgctgcgtggcccgcaatgccgctggccacacggagaggctggtctccctgaaggtgggactgaagccagaagcaaacaagcagtatcataacctggtcagcatcatcaatggtgagaccctgaagctcccctgcacccctcccggggctgggcagggacgtttctcctggacgctccccaatggcatgcatctggagggcccccaaaccctgggacgcgtttctcttctggacaatggcaccctcacggttcgtgaggcctcggtgtttgacaggggtacctatgtatgcaggatggagacggagtacggcccttcggtcaccagcatccccgtgattgtgatcgcctatcctccccggatcaccagcgagcccaccccggtcatctacacccggcccgggaacaccgtgaaactgaactgcatggctatggggattcccaaagctgacatcacgtgggagttaccggataagtcgcatctgaaggcaggggttcaggctcgtctgtatggaaacagatttcttcacccccagggatcactgaccatccagcatgccacacagagagatgccggcttctacaagtgcatggcaaaaaacattctcggcagtgactccaaaacaacttacatccacgtcttctgaaatgtggattccagaatgattgcttaggaactgacaacaaagcggggtttgtaagggaagccaggttggggaataggagctcttaaataatgtgtcacagtgcatggtggcctctggtgggtttcaagttgaggttgatcttgatctacaattgttgggaaaaggaagcaatgcagacacgagaaggagggctcagccttgctgagacactttcttttgtgtttacatcatgccaggggcttcattcagggtgtctgtgctctgactgcaatttttcttcttttgcaaatgccactcgactgccttcataagcgtccataggatatctgaggaacattcatcaaaaataagccatagacatgaacaacacctcactaccccattgaagacgcatcacctagttaacctgctgcagtttttacatgatagactttgttccagattgacaagtcatctttcagttatttcctctgtcacttcaaaactccagcttgcccaataaggatttagaaccagagtgactgatatatatatatatattttaattcagagttacatacatacagctaccattttatatgaaaaaagaaaaacatttcttcctggaactcactttttatataatgttttatatatatattttttcctttcaaatcagacgatgagactagaaggagaaatactttctgtcttattaaaattaataaattattggtctttacaagacttggatacattacagcagacatggaaatataattttaaaaaatttctctccaacctccttcaaattcagtcaccactgttatattaccttctccaggaaccctccagtggggaaggctgcgatattagatttccttgtatgcaaagtttttgttgaaagctgtgctcagaggaggtgagaggagaggaaggagaaaactgcatcataactttacagaattgaatctagagtcttccccgaaaagcccagaaacttctctgcagtatctggcttgtccatctggtctaaggtggctgcttcttccccagccatgagtcagtttgtgcccatgaataatacacgacctgttatttccatgactgctttactgtatttttaaggtcaatatactgtacatttgataataaaataatattctcccaaaaaaaaaa

SEQ ID NO: 3 - DNA, 540 bp, Homo sapiens
tttcaaatgttgccaaagtcatgggaactctagttaggaagatttcccctacttagagcatgtcactctggcgtggaccttcattcatctctttccccggcctggggttgatccattctcccttcttcccccttctcctgccctgcccccaccttctcagtcacaatctttgtcttcccagtttggcaggacatcccaggggcccctgggctttccttcctgaggttagaagatggtgctttgaaagaacaattgctcctaccacccatcaaatcaaacttttagaagctgataaaaaccttaaaaatcattcaatctcctcttctttctccttctgtagatgaggaatctgagggtctaagaggagacatgagctgctgagattgactgagctaggcagggccagacatagactccacgggcaggcccgcagtctttccaccaggtcaggccactccctcgcccagggctcaagattccttttagagttcaacagagcagctcccgagaacagaccagccctcaagactcaaatttcag

SEQ ID NO: 4 - DNA, 1986 bp, Homo sapiens
gttttctcatttgcaaccacccatgctggcatgaaagaaagtgaagctgctgggttgaactccatcttctgggggacatttgcagcctgcaggggcctggcaatcttttttgctacctgtttacagcctggaaccatgattgtgttgagcaacattggcagcctgacttcatctttatttctggtgctttttgacaagaacccaatttgtctctggatagcaacttcagtgtatggggcttcaatggcaaccacatttccgagtggtgtttcttggattgagcagtacacgaccatccatgggaaatctgcagcattttttgtaattggtgcttccctgggagaaatggctattcctgcagtcattggaattcttcaaggaaaataccctgatttgcctgtagttctgtatacctctttgggagcatcaatagctactggtattttatttcctgtgctatataaattagccacttcacctcttgatcgccagcgaaaagaagacagaaagagtgaggaccagaaagctctgctctctagctccgggctaaatgaatatgaggaagagaatgaagaggaggatgcagaaaaatggaatgaaatggattttgaaatgattgaaacgaatgatacaatgaggcattctataatagagacatctagaagtagtctgacggagcccacagctgaagtctataatcaatacccatcaaatgcactggtgtttgagtcttctccttttaatactggcagtgcccatgtgaagcacttgccagaaaccaggacaaaagggactaacgtttagagaagatggattactcactgacatctttgaataactgccacttctaaggacgccattcagagcagagcattagcagaatttcaccatgctttggggattaaaatttttaggtccatattatagcaaatgctaaaaatttttgaaatgttctgtaattcccagagtcttccataaataaccaaatggtctcatacacgtacaataggatcttgttataacgctatcatttgacatgtgactgattaggaaatattttatggtctccacccctcagagcacccaaagaaggcattgtttttgagaaggggggtattctcagaatgagaccatgtaggagttgaattgattggttgaacaaattatcaggtatcaatatttttccaggaaagttgaggagaatagtttcataaaagagaaatgggccgggattacaggcttgagcccccgcgcccagccatcaaaatgctttttatttctgcatatgttgaatactttttacaatttaaaaaaatgatctgttttgaaggcaaaattgcaaatcttgaaattaagaaggcaaaaatgtaaaggagtcaaaactataaatcaagtatttgggaagtgaagactggaagctaatttgcattaaattcacaaacttttatactctttctgtatatacattttttttctttaaaaaacaactatggatcagaatagccacatttagaacactttttgttatcagtcaatatttttagatagttagaacctggtcctaagcctaaaagtgggcttgattctgcagtaaatcttttacaactgcctcgacacacataaacctttttaaaaatagacactccccgaagtcttttgttcgcatggtcacacactgatgcttagatgttccagtaatctaatatggccacagtagtcttgatgaccaaagtcctttttttccatctttagaaaactacatgggaacaaacagatcgaacagttttgaagctactgtgtgtgtgaatgaacactcttgctttattccagaatgctgtacatctattttggattgtatattgtgtttgtgtatttacgctttgattcatagtaacttcttatggaattgatttgcattgaacacaaactgtaaataaaaagaaatggctgaaagaaaaaaaaaaaaaaaaaaaaaaaaaaaaaaaa

SEQ ID NO: 5 - DNA, 7288 bp, Homo sapiens
catagagccagcgggcgcgggcgggacgggcgccccgcggccggacccagccagggcaccacgctgcccggccctgcgccgccaggcacttctttccggggctcctagggacgccagaaggaagtcaacctctgctgcttctccttggcctgcgttggaccttcctttttttgttgtttttttttgtttttcccctttcttccttttgaattaactggcttcttggctggatgttttcaacttctttcctggctgcgaacttttccccaattgttttccttttacaacagggggagaaagtgctctgtggtccgaggcgagccgtgaagttgcgtgtgcgtggcagtgtgcgtggcaggatgtgcgtgcgtgtgtaacccgagccgcccgatctgtttcgatctgcgccgcggagccctccctcaaggcccgctccacctgctgcggttacgcggcgctcgtgggtgttcgtgcctcggagcagctaaccggcgggtgctgggcgacggtggaggagtatcgtctcgctgctgcccgagtcagggctgagtcacccagctgatgtagacagtggctgccttccgaagagtgcgtgtttgcatgtgtgtgactctgcggctgctcaactcccaacaaaccagaggaccagccacaaacttaaccaacatccccaaacccgagttcacagatgtgggagagctgtagaaccctgagtgtcatcgactgggccttcttatgattgttgttttaagattagctgaagatctctgaaacgctgaattttctgcactgagcgttttgacagaattcattgagagaacagagaacatgacaagtacttctagctcagcactgctccaactactgaagctgattttcaaggctacttaaaaaaatctgcagcgtacattaatggatttctgttgtgtttaaattctccacagattgtattgtaaatattttatgaagtagagcatatgtatatatttatatatacgtgcacatacattagtagcactacctttggaagtctcagctcttgcttttcgggactgaagccagttttgcatgataaaagtggccttgttacgggagataattgtgttctgttgggactttagacaaaactcacctgcaaaaaactgacaggcattaactactggaacttccaaataatgtgtttgctgatcgttttactcttcgcataaatattttaggaagtgtatgagaattttgccttcaggaacttttctaacagccaaagacagaacttaacctctgcaagcaagattcgtggaagatagtctccactttttaatgcactaagcaatcggttgctaggagcccatcctgggtcagaggccgatccgcagaaccagaacgttttcccctcctggactgttagtaacttagtctccctcctcccctaaccacccccgcccccccccaccccccgcagtaataaaggcccctgaacgtgtatgttggtctcccgggagctgcttgctgaagatccgcgcccctgtcgccgtctggtaggagctgtttgcagggtcctaactcaatcggcttgttgtgatgcgtatccccgtagatgccagcacgagccgccgcttcacgccgccttccaccgcgctgagcccaggcaagatgagcgaggcgttgccgctgggcgccccggacgccggcgctgccctggccggcaagctgaggagcggcgaccgcagcatggtggaggtgctggccgaccacccgggcgagctggtgcgcaccgacagccccaacttcctctgctccgtgctgcctacgcactggcgctgcaacaagaccctgcccatcgctttcaaggtggtggccctaggggatgttccagatggcactctggtcactgtgatggctggcaatgatgaaaactactcggctgagctgagaaatgctaccgcagccatgaagaaccaggttgcaagatttaatgacctcaggtttgtcggtcgaagtggaagagggaaaagcttcactctgaccatcactgtcttcacaaacccaccgcaagtcgccacctaccacagagccatcaaaatcacagtggatgggccccgagaacctcgaagacatcggcagaaactagatgatcagaccaagcccgggagcttgtccttttccgagcggctcagtgaactggagcagctgcggcgcacagccatgagggtcagcccacaccacccagcccccacgcccaaccctcgtgcctccctgaaccactccactgcctttaaccctcagcctcagagtcagatgcaggatacaaggcagatccaaccatccccaccgtggtcctacgatcagtcctaccaatacctgggatccattgcctctccttctgtgcacccagcaacgcccatttcacctggacgtgccagcggcatgacaaccctctctgcagaactttccagtcgactctcaacggcacccgacctgacagcgttcagcgacccgcgccagttccccgcgctgccctccatctccgacccccgcatgcactatccaggcgccttcacctactccccgacgccggtcacctcgggcatcggcatcggcatgtcggccatgggctcggccacgcgctaccacacctacctgccgccgccctaccccggctcgtcgcaagcgcagggaggcccgttccaagccagctcgccctcctaccacctgtactacggcgcctcggccggctcctaccagttctccatggtgggcggcgagcgctcgccgccgcgcatcctgccgccctgcaccaacgcctccaccggctccgcgctgctcaaccccagcctcccgaaccagagcgacgtggtggaggccgagggcagccacagcaactcccccaccaacatggcgccctccgcgcgcctggaggaggccgtgtggaggccctactgaggcgccaggcctggcccggctgggccccgcgggccgccgccttcgcctccgggcgcgcgggcctcctgttcgcgacaagcccgccgggatcccgggccctgggcccggccaccgtcctggggccgagggcgcccgacggccaggatctcgctgtaggtcaggcccgcgcagcctcctgcgcccagaagcccacgccgccgccgtctgctggcgccccggccctcgcggaggtgtccgaggcgacgcacctcgagggtgtccgccggccccagcacccaggggacgcgctggaaagcaaacaggaagattcccggagggaaactgtgaatgcttctgatttagcaatgctgtgaataaaaagaaagattttatacccttgacttaactttttaaccaagttgtttattccaaagagtgtggaattttggttggggtggggggagaggagggatgcaactcgccctgtttggcatctaattcttatttttaatttttccgcaccttatcaattgcaaaatgcgtatttgcatttgggtggtttttatttttatatacgtttatataaatatatataaattgagcttgcttctttcttgctttgaccatggaaagaaatatgattcccttttctttaagttttatttaacttttcttttggacttttgggtagttgtttttttttgttttgttttgtttttttgagaaacagctacagctttgggtcatttttaactactgtattcccacaaggaatccccagatatttatgtatcttgatgttcagacatttatgtgttgataattttttaattatttaaatgtacttatattaagaaaaatatcaagtactacattttcttttgttcttgatagtagccaaagttaaatgtatcacattgaagaaggctagaaaaaaagaatgagtaatgtgatcgcttggttatccagaagtattgtttacattaaactccctttcatgttaatcaaacaagtgagtagctcacgcagcaacgtttttaataggatttttagacactgagggtcactccaaggatcagaagtatggaattttctgccaggctcaacaagggtctcatatctaacttcctccttaaaacagagaaggtcaatctagttccagagggttgaggcaggtgccaataattacatctttggagaggatttgatttctgcccagggatttgctcaccccaaggtcatctgataatttcacagatgctgtgtaacagaacacagccaaagtaaactgtgtaggggagccacatttacataggaaccaaatcaatgaatttaggggttacgattatagcaatttaagggccaccagaagcaggcctcgaggagtcaatttgcctctgtgtgcctcagtggagacaagtgggaaaacatggtcccacctgtgcgagaccccctgtcctgtgctgctcactcaacaacatctttgtgttgctttcaccaggctgagaccctaccctatggggtatatgggcttttacctgtgcaccagtgtgacaggaaagattcatgtcactactgtccgtggctacaattcaaaggtatccaatgtcgctgtaaattttatggcactatttttattggaggatttggtcagaatgcagttgttgtacaactcataaatactaactgctgattttgacacatgtgtgctccaaatgatctggtggttatttaacgtacctcttaaaattcgttgaaacgatttcaggtcaactctgaagagtatttgaaagcaggacttcagaacagtgtttgatttttattttataaatttaagcattcaaattaggcaaatctttggctgcaggcagcaaaaacagctggacttatttaaaacaacttgtttttgagttttcttatatatatattgattatttgttttacacacatgcagtagcactttggtaagagttaaagagtaaagcagcttatgttgtcaggtcgttcttatctagagaagagctatagcagatctcggacaaactcagaatatattcactttcatttttgacaggattccctccacaactcagtttcatatattattccgtattacatttttgcagctaaattaccataaaatgtcagcaaatgtaaaaatttaatttctgaaaagcaccattagcccatttcccccaaattaaacgtaaatgttttttttcagcacatgttaccatgtctgacctgcaaaaatgctggagaaaaatgaaggaaaaaattatgtttttcagtttaattctgttaactgaagatattccaactcaaaaccagcctcatgctctgattagataatcttttacattgaacctttactctcaaagccatgtgtggagggggcttgtcactattgtaggctcactggattggtcatttagagtttcacagactcttaccagcatatatagtatttaattgtttcaaaaaaaatcaaactgtagttgttttggcgataggtctcacgcaacacatttttgtatgtgtgtgtgtgtgcgtgtgtgtgtgtgtgtgtgaaaaattgcattcattgacttcaggtagattaaggtatctttttattcattgccctcaggaaagttaaggtatcaatgagacccttaagccaatcatgtaataactgcatgtgtctggtccaggagaagtattgaataagccatttctactgcttactcatgtccctatttatgatttcaacatggatacatatttcagttctttctttttctcactatctgaaaatacatttccctccctctcttccccccaatatctccctttttttctctcttcctctatcttccaaaccccactttctccctcctccttttcctgtgttctcttaagcagatagcacatacccccacccagtaccaaatttcagaacacaagaaggtccagttcttcccccttcacataaaggaacatggtttgtcagcctttctcctgtttatgggtttcttccagcagaacagagacattgccaaccatattggatctgcttgctgtccaaaccagcaaactttcctgggcaaatcacaatcagtgagtaaatagacagcctttctgctgccttgggtttctgtgcagataaacagaaatgctctgattagaaaggaaatgaatggttccactcaaatgtcctgcaatttaggattgcagatttctgccttgaaatacctgtttctttgggacattccgtcctgatgatttttatttttgttggtttttatttttggggggaatgacatgtttgggtcttttatacatgaaaatttgtttgacaataatctcacaaaacatattttacatctgaacaaaatgcctttttgtttaccgtagcgtatacatttgttttgggatttttgtgtgtttgttgggaattttgtttttagccaggtcagtattgatgaggctgatcatttggctctttttttccttccagaagagttgcatcaacaaagttaattgtatttatgtatgtaaatagattttaagcttcattataaaatattgttaatgcctataactttttttcaatttttttgtgtgtgtttctaaggactttttcttaggtttgctaaatactgtagggaaaaaaatgcttctttctactttgtttattttagactttaaaatgagctacttcttattcacttttgtaaacagctaatagcatggttccaattttttttaagttcactttttttgttctaggggaaatgaatgtgcaaaaaaagaaaaagaactgttggttatttgtgttattctggatgtataaaaatcaatggaaaaaaataaactttcaaattgaaatgacggtataacacatctactgaaaaagcaacgggaaatgtggtcctatttaagccagcccccacctagggtctatttgtgtggcagttattgggtttggtcacaaaacatcctgaaaattcgtgcgtgggcttctttctccctggtacaaacgtatggaatgcttcttaaaggggaactgtcaagctggtgtcttcagccagatgacatgagagaatatcccagaaccctctctccaaggtgtttctagatagcacaggagagcaggcactgcactgtccacagtccacggtacacagtcgggtgggccgcctcccctctcctgggagcattcgtcgtgcccagcctgagcagggcagctggactgctgctgttcaggagccaccagagccttcctctctttgtaccacagtttcttctgtaaatccagtgttacaatcagtgtgaatggcaaataaacagtttgacaagtacatacaccataaaaaaaaaaaaaaaa

SEQ ID NO: 6 - DNA, 1466 bp, Homo sapiens
ggagaattggagaagcttgtgccctgctggaaagtgggatggcagtacccgcttcatctagtagtcggggagatcaagagaggtatgggacctgaagaggatggcagactgtgcagtgcggtgcacaccggtctccaggttgttttcaccctcctgtctcctcccaggagctaacgtgtaagcaaacatgtttggatagagggctggtgccacgccccaggctcaccccgcccgcacagccgtcgtccacccctcccctttcttacagataaagctgaggctcggccagggactgtgatatacccacatccccggaactaggtgatcgcggtgcaggaaccaggtgtgccttcgcgggatccatgccttgaggcccaggaacgccccgccgccagcatgccgtgggacgcgcggcggcctgggggtggcgcggacggcgggcccgaggcctcgggcgcggcgcgctcgcgagcgcagaagcagtgccgcaagtcgtcgttcgccttctaccaggcggtgcgcgacctgctacccgtgtggctgctggaggatatgcgcgccagcgaggccttccactgggacgagcgcgggcgcgccgccgcctactcgccctctgaggcgctgctctacgcgctcgtgcacgaccaccaagcgtacgcgcattacctgctggccacgttcccgcggcgcgcgctcgcaccgcccagtgccggcttccgctgctgcgcggctcccgggccgcacgtggcgctggcagtgcgctacaaccgcgtgggcattctgcgccgcatcctgcgcaccttgcgcgacttcccggccgaggagcgggcgcgcgtgctggaccggcgtggctgcagccgcgtggagggcggtggcacgtcgctgcacgtggcctgtgagctggcgcgccccgagtgcctcttcctgctgctgggccacggcgcctcgcccggtctgcgggacggcggcggcctcacgcctctcgagctgctgctgcgccagctgggccgcgacgccggggccactccctccgccgccggagcccccgcctcagctcccggggagccgcgccagcgccgcctgctgctgctggacctcctggcgctgtacacccccgtgggtgccgccggctcggcccgccaggagctgctgggcgaccggccgcgctggcagcggctgctgggtgaggacaagttccagtggctggcgggcctggcgccgccctcgctcttcgcgcgcgccatgcaggtgctggtcaccgccatctctccaggccgcttccccgaggccctggacgagctgccgctgcccccattcctgcagccgttggacctcactggcaaaggctaggcccggagcaccctaggcgctggattttgggacaaaactatttttcagagcgttgtaccggcactttatatatattgatctctgtacggcaaaaaaaaaaaaaaaaaaaaaaaaaa

SEQ ID NO: 7 - DNA, 768 bp, Homo sapiens
  misc_feature (7)..(7): n is a, c, g, or t
  misc_feature (14)..(14): n is a, c, g, or t
  misc_feature (22)..(22): n is a, c, g, or t
  misc_feature (392)..(393): n is a, c, g, or t
atttganccccttnccttgaanccccatcgtatcgggacgcgcgccattgtgttggtacccgggaattcggccattatggccgggagaaacgagatgggggtgaagctggagatatttcggatgataatctacctcactttccctgtggctatgttctgggtttccaatcaggccgagtggtttgaggacgatgtcatacagcgcaagagggagctgtggccacctgagaagcttcaagagatagaggaattcaaagagaggttacggaagcggcgggaggagaagctccttcgcgacgcccagcagaactcctgaggcctccaagtgggagtcctagcccctcccctgatgaaatatacatatactcagttccttgttaagaaaaaaaaannaaaaaaaaaaaaaaaaaaacatgtcggccgcctcggcccagtcgactctagactcgagcaagcttatgcatgcggccgcaattcgagctcacttggccaattcgccctatagtgagtcgtatcacaattcactggcccgcgttttacaacgtcgtgacttggaaaaactcttgccgttacccaacctaaattgcctttgaacaaaaatcccctttgcgcaagttggctaatatccaagagagcccgaaccaatcggcctttccaacagttgcccagcttgatgccaattgaaattgtgagccttaaattttggttaaattcgggtaaatttttggttaatcagctcaatttttaacccaaaggccatggcccttt

SEQ ID NO: 8 - DNA, 515 bp, Homo sapiens
atttcaaacaaatccaaaacttatttttgtttatagaaacaagacaacacacagtaaaattgaggaaatacaatagttttttcaatatagtaccacaagccattttttctgtaaaggaccaaatattagatactatcacaaaacattttatcactcattcaaaacaagaatcattcagttgccccaggaaaaaacacactgaaattattttagatagcataataagctagaggatatagaacatttgaaaaacagttccaaaaaatggaatactaaagatgcaacattaattcttagtacatttgttatggtaatgaattaaagcattatagaatatattcaagtcagaaatcctgtagtatgaagacataccttcatatgtgaaaatattattttatattaataataattattctggtatttatatcagatttatcatcagattttctttcctgaatttattaataatttgaccatggaacacaaaaatatttcattcattttataatactttg

SEQ ID NO: 9 - DNA, 534 bp, Homo sapiens
tttgatatcattaaagtttattcaagaattgtttgacagacaacccttttaggtaaggaaaaaagtaactactgaagaacaaagaaagttccaagagggaattaactctagttctacaaattcaggactatacagtgacgattaggagctgagttcatgccttttagaactaattacaattgttcgtaagtacgagtttaacataaatctacagctcttttctagagtacaatagtaactaaaatagctggttttacatgacaggaaacacaatgtcctttgtaacaggtaaatactaaaaaagtacaattttttcctttttttccctcatataaatacataatgtagggggataaataatacaaaaaagaaaatattttaacaggctataaccaataaatatatatgaaaatgttcactagaacacacgcttttttgagcaatgctggacttctgcaggcccagacatctctcacagttgtttttacatccattaaaatgtaaattctaagtgcaacaaaagtgtcctgtcag

SEQ ID NO: 10 - DNA, 469 bp, Homo sapiens
ttacgttttatttttatttatttactttttttagagatggagtctcactctgttgccaggctggagtgcagcggtgtgatcttggctcactgcaacttccgccccctgggttcaagtgattctcctgcctcagccttccaagtagctgggattacaggcatgcaccaccacacctggctaatttttgtatctttagtagagacggggtttcaccatgttggccaggatggtcttgatctcttgacctggtgatctgcctgcctcagcctcccaaagtgctgggatacaggtgtgagccaccgtgcctggcctatgtatttttttttttaaacacacacataaatctaaagcaaagggtatgccaagattcagctggggccaggtctgacccccactctgagcatctcattagcttcccatcagtggaatacaatggagacatattccacttggtctggcaatgtcctcc

SEQ ID NO: 11 - DNA, 2599 bp, Homo sapiens
cagattcacaaactgcaggactgggcagggagcagacagtgagcaaacgccagcagggctgctgtgaatttgtgtaaggattgagggacagttgcttttcagcatgggcccaggaatgccaaggagacatctatgcacgaccttgggaaatgagttgatgtctccggtaaaacaccggagactaattcctgccctgcccaattttgcagggagcatggctgtgaggatggggtgaactcacgcacagccaaggactccaaaatcacaacagcattactgttcttatttgctgccacacctgagccagcctgctccttcccaggagtggaggaggcctggggggagggagaggagtgactgagcttccctcccgtgtgttctccgtccctgccccagcaagacaacttagatctccaggagaactgccatccagctttggtgcaatggctgagtgcacaagtgagttgttgccctgggtttctttaatctattcagctagaactttgaaggacaatttcttgcattaataaaggttaagccctgaggggtccctgataacaacctggagaccaggattttatggctcccctcactgatggacaaggaggtctgtgccaaagaagaatccaataagcacatattgagcacttgctgtatatgcagtattgagcactgtaggcaagacccaagaaagagaaggagccatctccatcttgaaggaactcaaagactcaagtgggaacgactgggcactgccaccaccagaaagctgttcgacgagacggtcgagcagggtgctgtgggtgatatggacagcagaagggggagaccaaggttccagctcaaccaataactattgcacaaccacctgtccctgcctcagttcccttttatgtaacatgaagtcgttgtgagggttaaaggcagtaacaggtataaagtacttagaaaagcaaagggtgctacgtacatgtgaggcatcattacgcagacgtaactgggatatgtttactataaggaaaagacactgaggtctagaaatagctccgtggagcagaatcagtattgggagccggtggcggtgtgaagcaccagtgtctggcacacagtaggtgctcattggctcccttccacctgtcattcccaccaccctgaggccccaaccgccacacacacaggagcatttggagagaaggccatgtcttcaaagtctgatttgtgatgaggcagaggaagatatttctaatcggtcttgcccagaggatcacagtgctgagaccccccaccaccagccggtacctgggaagggggagagtgcaggcctgctcagggactgttcctgtctcagcaaccaagggattgttcctgtcaatcaatggtttattggaaggtggcccagtatgagccctagaagagtgtgaaaaggaatggcaatggtgttcaccatcggcagtgccagggcagcactcattcacttgataaatgaatatttattagctggttggagagctagaacctggagagctagaacctggagaactagaacctggagggctagaacctggagaggctagaaccaagaagggctagaacctggaggggctagaacctagagaagctaaaacctgagctagaagctggaggactagaacctggagggctggaatctgaagggctagaacctggagggctggaatctggagagctagaacctggagggctagaacctggagggctagaacctagaagggctagaacctggagggctggaatctggagagctagaacctggagggctagaacctggagggctagaacctagaagggctagaacctggagggctagaacctggcaggttagaacctagaagggctagaacctggagagccagaacctggagggctagaacctggaagggctagaacctgtagagctagaacatggagagctagaacccggcaggctagaacctggcaagctagaacctggagggaatgaacctggagggctagaacctggagaatgagaaaaatttacatggcaaagagcccataaatcctgaccaatccaactctgaattttaaagcaaaagcgtgaaaaaaaagattccctccttacccccaacccactcttttttcccaccacccactctcctctgcctcagtaagtatctggaggaagaaaacaggtgaaagaagaagtaaaaaccatttagtattagtattagaatgaagtcaaactgtgccacacatggtgaatgaaaaaaaaaaaaaagaggctgtgttttgtcacacagggcagtcattcagcaccagagcacgtgatggtctgagactctcttaggagcagagctctgccgcaatggccatgtggggatccacacctggtctgaggggcaactgagtctgcgggagaagagcggccctatgcatggtgtagatgccctgataaagaacatctgtcctgtgaaagactcaatgagctgttatgttgtaaacaggaagcatttcacatccaaacgagaaaatcatgtaaacatgtgtcttttctgtagagcataataaatggatgaggtttttgcaaaaaaaaaaaaaaaaa

SEQ ID NO: 12 - DNA, 5571 bp, Homo sapiens
attttccccgcacaactgctaaagctccagagacacgagcgtgtgtggcagcaagagccgccagttcgggaccaccgcagctggggtggcagcggcgcaggaggggtcgcggggagggagtggtgagcgcaggcggcaggggtctgggaaagacgaagtcgctatttgctgtctgagcgcgctcgcagctcctggaagtgttgccgcctctcggtttgtctcgcctgctgcgctcctagaagggcggccgcctccaggactgaccagggccaagtggcgctcggcgggcactacatggcggagggtgaagggtacttcgccatgtctgaggacgagctggcctgcagcccctacatccccctaggcggcgacttcggcggcggcgacttcggcggcggcgacttcggcggcggcggcacgttcggtgggcattgcttggactattgcgaaagccctacggcgcactgcaatgtgctgaactgggagcaagtgcagcggctggacggcatcctgagcgagaccattccgattcacgggcgcggcaacttccccacgctcgagctgcagccgagcctgatcgtgaaggtggtgcggcggcgcctggccgagaagcgcattggcgtccgcgacgtgcgcctcaacggctcggcagccagccatgtcctgcaccaggacagcggcctgggctacaaggacctggacctcatcttctcggccgacctgcgcggggaaggggagtttcagactgtgaaggacgtcgtgctggactgcctgttggacttcttacccgagggggtgaacaaagagaagatcacaccactcacgctcaaggaagcttatgtgcagaaaatggttaaagtgtgcaatgactctgaccgatggagtcttatatccctgtcaaacaacagtggcaaaaatgtggaactgaaatttgtggattccctccggaggcagtttgaattcagtgtagattcttttcaaatcaaattagactctcttctgctcttttatgaatgttcagagaacccaatgactgagacatttcaccccacaataatcggggagagcgtctatggcgatttccaggaagcctttgatcacctttgtaacaagatcattgccaccaggaacccagaggaaatccgagggggaggcctgcttaagtactgcaacctcttggtgaggggctttaggcccgcctctgatgaaatcaagacccttcaaaggtatatgtgttccaggtttttcatcgacttctcagacattggagagcagcagagaaaactggagtcctatttgcagaaccactttgtgggattggaagaccgcaagtatgagtatctcatgacccttcatggagtggtaaatgagagcacagtgtgcctgatgggacatgaaagaagacagactttaaaccttatcaccatgctggctatccgggtgttagctgaccaaaatgtcattcctaatgtggctaatgtcacttgctattaccagccagccccctatgtagcagatgccaactttagcaattactacattgcacaggttcagccagtattcacgtgccagcaacagacctactccacttggctaccctgcaattaagaatcatttaaaaatgtcctgtggggaagccatttcagacaagacaggagagaaaaaaaaaaaaaagaaaaaaaaaagagtgatccagcccttattagggatgtgttttgtgcaatgatgatatgctcctggttttaagtttggcaaagcttatgtatcttttaatagatgtgggagcatgatctcgaaaggatccttttcccttctcttattctcctacccaattggattctatcctgcaaaaaaagagagacctgtcattagaagcaaccaggttctcctgatacaagagaagaaatgtgtgatgacaatatgggtttgctgtatctgctcccatagctttgccataggaaaaaaaaaagtggaaagtttcttttaagatggaattcataaaagggaaaatacggaggaaaaaaggtctcactccaacttgtgaatcagtttaggagttcagatattaatagtaacaatacaggaaaaaggggaactccaacgttgggattactgtctgaggcttgtagcaagtgctttctgtggaatgatcttgttttgctaacaaacggcttgctccaaatgaacagtagtaggttggtgcagttctcgtaacaatcagcagaacttatgatgacacaatccattaattccagctgcgtgcatagatcacatttttaaaatgtaaaaatgcaagcaaaaacagctgtaacaaagaaagtgtgctcaaggaccaaagatttaacagataaaaatacccaattagaagagatatagtagactatatgaagagagattatatttgttacacaccaatatacatcaaagtgcctgttgccttctgaaaatttgaagtggcaaaattattttatggtttaatgattattttattttatcagggactgcctcaagaagaaaataacataagcttgtgaatggtggagaaaatgccctattttttcttgcaaatacttgtataaagttaacatttgttgatctgatattatcataggtacatgtgtatgtgtgtataaattatatgtgtgtgtgtatatatacattttatatatacattttatatgtatatatacacagtagattgactatgatctagaataatgtctcaaataggaaatgtttaaatactgtgtgtttttatgttttcaacaggataacatgagacgtgggcatattgcaatgatgaattaaatccacatctaaaaaaattaaatgaaggagggaaccaagtaatatatttcataggaagagcagaaattatactgttttagtgggatttttttttctttttttttttttctttggtgagccataaaattccacaaatgggagaatatttgtttggcagagcactcttttttatattgaactgccattttgacagttggaacccatttattaaaaaaaaaattgcattcctctatgatgtttaatctagtggatcatggatcagtaataggctacttaaatccctgactgctaaaaaggatttccggtgatctaaacactacttgctaatgtttaaatgaattttaatgaatgcattctgcatttctggaccactagaatttagtaatgtgaaatgaccctttttacagaatatttgcacaattgcttaaaatttatatatgagatatatattatatataacattttataaatcatgtcaatatgaaacatctttgatctggttgtcacactgcatttaaatatttagtactgtactttaaatcgctttccattaaatcaaatccaactttattttctttcttacaaaaataccagttatacctttgtgaaatgaactggcattactatttcagttcaataacagctaatcctaaaaccaccctttctcctagccagtagttcctctagatactggtctctgaaaatgcatttgttaaaaacaaaacaaaactaacacataagaaccttccctttgtgttgtgaaacaaccacataatctccacaaccttagtggatgactgcttgctatgataattcctcgaagacccaattagaagattttcatcatcagttaaagagagaccacgggagaaaaaaatatcctcctgttggcagtataatttgtttgtttgtttatctagggatcctcagatgcttagtgctaggttaatccaggttaatccgtctggactaccttttgtgcatctttctttgaagccttaatgggaacctgatgggtttgctgtagcagcttccttgtgaattctgtcagagctgcaacagccgctgcactgccactcagttttctaaggaactcctcctactaccatcttggctcagtctccctcacttaagccctgggtttgaaaaattaattgcaacttcccaggaaacattgttcagtttgcagattaagcctggcactcacctatcagaaaccagagctccgcctgcttagttgtttcaaagttttctgaaagaaaactaggggagcacttgtgaacacaggagcagctggtgatctgctttcttaccctaactcttgacaaatgagtcgtctactattttaaagagtctggaggtctctgactctgccataacaataacctgctgttaatttataacacagatttttgtttggaagagccttatttgaaatacactttgatttattttcttaaatatttatattcttttcttgcttacttcagggttggtagcttagttggaagtgccagcacctggcacctattcatatagaacaggctgtactcaagacaacttctagcatttactttaagacttatataatttatttctattttgtgtgtactatagtcttgtgcatatgtagttgaacacacagtgaaatatatgtctctctttgtggatgtgcggcctaaaaatttgaatgtctggtgagagagagccatgtgtataggtcagagaaaagaacagctcccgactccctattagcgcctgtgatttgtttccttttgtgtttatctggcctagtgtgctgtttctttaaaccaggaagaagttttgtcttttggaggctcttctcacctgtccagcctggcatgtcagagaacacatagcctgtgacaatgccgtttttaaaggtttacttaatttgcagtaaatccagctgcctcaagaactcctacaccaagatggacatttcctttccagaaatgggatcaagtatctgctcactttggtattggatggactaataatgtagctccaaaaatgcaaggatggaagaatatgtgtaatccaaaccaaggaaggaaatgaaaagtgaacgtactgtttttaccacccctttctgtttgcttattgttggttgcttcactgtgcataaagttgttttcaatgcaacgcttgttaaataaatattgtgaactattttgtaaatgaaatgtattatgttgaaagctgtcagttcaaaaataagcttttttgttgttgttgaagatgaagtgtgttaggtgaaaccaaaaagccaaaaaaagtaatttcatatatagcatctatttgaatataatctttctttaaaatttcttttagcatagcattttcagtgctaagaaagaatctctatgttatattttgttaaaataatggctttctaacaaagcaaatggtaaagtacaaagttggaagatgtcaagttaacgagacttgctgcaaagccttgcagaacggaggaggctcgcctgctggctgtctctccctccaacctctctacaatcatgcctgctttgaggtgttctgttgcagcaagctgcaccttgggtcactcttttggaatattttgactataggctgcgtcacaggcagaaaaggagttgatggaaaatggactaaaaaactgacatgtttgaatcagtgctagagggaacagattgtgaattttgtttacagcatccaatatttggatttttttgtaaataaaaaagttatttttttctattg

SEQ ID NO: 13 - DNA, 3093 bp, Homo sapiens
aggaagtggtgagttcggagtagagatggccgcgcttgcaccgctgcccccgctccccgcacagttcaagagcatacagcatcatctgaggacggctcaggagcatgacaagcgagaccctgtggtggcttattactgtcgtttatacgcaatgcagactggaatgaagatcgatagtaaaactcctgaatgtcgcaaatttttatcaaagttaatggatcagttagaagctctaaagaagcagttgggtgataatgaagctattactcaagaaatagtgggctgtgcccatttggagaattatgctttgaaaatgtttttgtatgcagacaatgaagatcgtgctggacgatttcacaaaaacatgatcaagtccttctatactgcaagtcttttgatagatgtcataacagtatttggagaactcactgatgaaaatgtgaaacacaggaagtatgccagatggaaggcaacatacatccataattgtttaaagaatggggagactcctcaagcaggccctgttggaattgaagaagataatgatattgaagaaaatgaagatgctggagcagcctctctgcccactcagccaactcagccatcatcatcttcaacttatgacccaagcaacatgccatcaggcaactatactggaatacagattcctccgggtgcacacgctccagctaatacaccagcagaagtgcctcacagcacaggtgtagcaagtaatactatccaacctactccacagactatacctgccattgatcccgcacttttcaatacaatttcccagggggatgttcgtctaaccccagaagactttgctagagctcagaagtactgcaaatatgctggcagtgctttgcagtatgaagatgtaagcactgctgtccagaatctacaaaaggctctcaagttactgacgacaggcagagaatgaagcctttgtatgacagacccatgtatttttggcatgaggaactaacagtccattactctatcttcagcctatcaggatcacagttttaaggaagacttggttttgttgaatatgacaatgaaatctgtgtgtatcagatttttattgaagcattcatcagcagcctcaaccagttttcattgtccatttactagattcaatcgtctctgagtatatagggctgatgttagcaagaccctaaaaatgtccattgaaccctgcttcaaaaaatgaaaacacacctctataaaatgtgtactgggaataagctttgtatttacatacattaggggaattttttaaaatctgtaatgtttggacaaacagatgatattactttgctataaaattataaatgtaacttttaataaagatagccagaatattctaaattagaaattacgtttttgtttccctcaagacataaaacaaatataaacattctaaactgctggatgaatctgaaaagacattaagttcaaattttaatttattctcatattaaatataactccattaaaagtttaaaatttcatgggagaaaatataataaggtaaagaggtagaatcactttcagacttaagaataatgttgatttcccaagtgctttaccttatctgttaaagcgtaagatgaattggtatttgcttcataggcagtttgactgcatgtattagagaatgaaaagaagatatttgtagtaatgcctggaaacttggtgctttaaattaaggtactcctctgctgctgtagaatggattccacacagtggatagctatgggtgattcagaatattatgtttagattcccatttgttaagtttataagttttgtggggaattatgaacttactgtgtactacctgcatttgtgctgtgtgaaaaataaatacaaggattcgtttagctaattcaacttactacaaagacaaatgtctgtttttatttgcctgctaggattgtcttttttaaaagtcatttttatttataggaatatgggtgtttctataggaagaaacaggttttttgttttttgttttttaagataaatttgacaaagttaactgaaatttatctggtccattttattcatgctactaagatgggaatctttaaacacaagggtcagcaagctttggcccatggattggccacctgttacgtaaataaagtttctttgaaacaagcctacactcattcatttatgttttgtctgtggttgctttccacaactgcagagttgtatggcttgcaagtctaaaaacatttactatttggccctctaagaaaaagttaagacacctagtctaatggccttttgggaaaaaacaaatcactaactcataatcatttatatccattattttctgcataaatgtaatgctattgtacagggtttggtagaataaatattcagactgactaaactgttctaaatcctcacaaaaaagtccccaaacaacatgcctcctaaaaaacattttcctatcttttacaagaggtatgaacatttgtagggttccacatttgcatctagaaatccaatgctctttagaatgttattacgaatagaaagatggccaggatgacctttagtgttacatgatgttcagcaaattttaattcaaaccttgatatgcctggacactgaaaagtaaacgcatcacctcctattttatacactaccttctggttcccaattgggagagcacatagagggaaggagacaatatagaaactacggagtccgctggtagtgggctgcatggtgtgacagagcccttctctgtaaaatggaaatgacaccactagccatctcaatagttacaagaattaaaagagatacagtacctgaagtgcttagcgcatggtagcatttcataaatgtttagtgtcaatactaatgctctaataatgtaaattgttaataatttatttccctaatatcaggaaatcccagttgtctatgtggcccagtgcttaaaaacgccttcttgcatgaggggattgaactatacaatgtttgttaactttgtatttgtattttttcctataaaatcttaaaataaaattaggagatgtgttccgaaaaaaaaaaaaaaaa

SEQ ID NO: 14 - DNA, 2114 bp, Homo sapiens
ccacgcgtccgaccaatgtcatccccaaaggaagggtgagctgaatggaaattaagcccagtcattttatttgatctattagctctgttatcagtgcatgatcacccagatcaccctcctcagcccacacagtgctgaaccatcttccctcctgttctccatggctattaatagtatagctaaatttagagtgcagagccagatataagtattttggaattatctcccagtttgtggtagaagctgactggaatacaggttgagtatctcttatccaaaatgctagggaccagaaaggtttcagattttttcagattttggaatacttaacagttgagcaccccaaatctgaaaggcttctgaacgtcatgtcagcactcaaaaaagtggattttggagcacttcaaatttcggatttttggatttgggatgctcatcctgtgtaggagaggctactcgattccatttaatgactgtcctagtcataatcatccaaagataaaagccaggtagatgttgaaagctctttccagggctgaaaaagtgttcttacgttctctgcatgtgactagcatcactgtggaaattaatgctctgttcttcactagaatgtagtaagtggttaaactgagctatcccccacctgatgactattggcatccatttgcaaggccaatggcctggattaagggttaggattatttgtagctagaaggtaattttatttctgtgaaactaattggctcatatttgaggttaggtgtggccttgaccttaccagtacatttatacccactaccagttgactagcccagataattgttaaatggtgcttcttttctgcttctcagtagacttccatgccattacaaaggaaatttgaattacctagtgtttgtatattccatgataactatgtataacttctgttacacagcttatgtattgttaacatttaagtgtaaaccatgccacagctaacacttaaaaatgaaaactaattagttcttgcttagggaaaatgccaggtatgaagtatggcatatacttgacactgtcctgtgtaaccctttactttgctcaggctttcaagattgagtcttttttcccccaaattaggttaacatgcatttgaccccaacctgtggggtttgagtaagctggaaatctgtgacggtaggctttctagtgtcacgaggtggtggtgactgaaggaaaagctgggatcacaggttccttctgatggagaggaaggtttatttctatgcccctcccaccaccctccacctagagctcacccaagcctgctccagtcccaggggcaggccattctgcaaaagcaggacctcacagaaacaagggctgggttgaggtcacccccttcagagttggttcctggccagatgggtaagaggcatttgtaattttaaaaatgtgaaacttgggtttggtgttttcttctaagtgcctaaataagcaagccaggctgttgatattttagccagagaaatcggcaagccaagattaacccgaatctgaagtttagaatcttgagtttgcatctgcatcatatcatgctgttttgatgaggaaacatttgccactgaggagttggagggagggcaagacgacagtgttaagtcagatcatttaatggtttcccctaagccctggaaaaatatttgaaagaatggcagcaaaaaggttaagaaagcaagccagatttactgcacaatatgcagtacccagtactactttaaatcccaagagaacagtgtgatgtctaatatatacaggtctatgaaaatactgtggaataagcccaggaaggttagatgtgtttgcaaataagttgcccaaagggtccccctctaagtaaaacaaatattcagaccacaggctttaatgtaaactgtcaaaaagtgggatgtggaggatttttgttaagtgtcaatcgaagttaaaaagcaagggtttttggccaggcgtggtggctcacgcctgtaatcccagcactttgggaggccgaggccggcaaatcacctaaggtcaggagttcgagaccagcctggccaacatggtgaaaccccgtctctactaaaaaaaaaaaaaaa

SEQ ID NO: 15 - DNA, 2756 bp, Homo sapiens
gttgctagagataccgcctggaggccactgatctgtaaaagggatctctacagaagatagggatttttgatcgccagagaagaagggatatgtgagatccaaacgccgaaggaggaaagcaggctccgtggtctcttccagccctgatggaagaaactaccgagccttattatactaggtgctttccacatgcctattcatttaatcctccagcaaccttgtaagaagggccatcccattttatatttaaacaaaccttaactactgacgcaaggagtcaaggatctaatcccaaagcctctgcctggttcgctgcagatggatgtccgcgaggacgccagccctccgcctcccgccgggtccctgaacgccggcccggccggtccaacctcattccgcttcccgccatcgaaacgcgaagcccccgccttcccccaaacgtctcagcgccgctggggcctttctggctgcgccgcctccgaccccaggccccggtccgcgcccgccgctcgctagtcctgggagtgaggagaacgcgtgctgaggacccggccagagggacagcggggaccgccctcccgctgcgtctctgaaagcgaggccgttcctcccgcgtccgacccccgcggggccgtcaggttcggggcggcccaggctgcgggtccgcagggcgcttcgggccgagccggcgcggcgcgtgaagggcaggggacgccccgaaagaccgctggggtgggaccccaagctccaggggtctttggaaataagaatgcggcgtgacgttggctgtgcgggcgcggggctgacgcggaccctataacccatcgccgaaaccgggcggccgcgcccctattcctcggcatttctctctgtccgcggccctgctcagccaatcagcgagtgggctcctaggcaggtcctgagtgacagcgcggcgggctggatcaggagatgcgcgtgcgcggcccggcccggctgatcgcttcgggtgctcgactcctgttgcgcatgctcagcgcgctgcccggctggggacccgcgcacctgcagcgcccgctgctcggccctgcatcctgcctgggcatcctgcgcccggccatgacggcgcactcattcgccctcccggtcatcatcttcaccacgttctggggcctcgtcggcatcgccgggccctggttcgtgccgaagggacccaaccgcggagtgatcatcaccatgctggtcgccaccgccgtctgctgttacctcttctggctcatcgccatcctggcgcagctgaaccccctgttcgggccccagctgaagaatgagaccatctggtacgtgcgcttcctgtgggagtgacccgccgcccccgacccaggtgcccagctctcggaatgactgtggctccactgtccctgacaaccccttcgtccggaccctcccccacacaactatgtctggtcaccagctccctcctgctggcacccagagacccggacccgcagggcctgcctggttcctggaagtcttcccagtcttcccagccagcccgggccctggggagccctgggcacagcagcggccgaggggatgtcctgctccaatacccgcactgctctggagtttgccctctttcccaaggagatgctgctggggagctggtatgggtggggtctttccctttacagacggggcagatgccaggactcagcccatcctgaggaggacacgtgtcctcatggagagggtgctccggcccaggcgggggagtcagtgcccagtcagcagctctgccaccatcctgctgggaactgggggggcctctattgggttataggcaaggccttttctctggcatggaattgttaattttctgacacgtctagatgtgaaatttctgaaaatgttgaagcagagaaacattcacacacaaaaagcaacatagtcatgtgggtccagatggcctcagtcctagatgttggcaccctttgctgtgtctcctcagagtatcctgttccgcctcctgccacctggacctccctcagtggatgtcttccctcccccgaccccagcctgtcagtccgagcacagtgcaggtttggctctgacttgggcttttggctgcagtgggggtggatttcagagcctctcatggcagcatctaagtgaccagagctgggatgagagaggggaaggggcaatgtgagtggcgctatgggacgggccagccctgctcctgagccagccccgccctctgccccctggccctgggctctgtgctagggatggtgaagaatgggggcgtgccagcctggcaggagtgggaagcaacacgcaggggtcccggacctctccagccttgccctcacgcttacccgagctcccagtgtggttagcacagagctcacccaccttgcctggctcccagctggggcctgtcctcactggtgctccaggggaagaaacgacagcctcacttctgtatggactgctgatgtggcctgccatcctgttcagcgggcattgtctttggagcagcaggagaataggatgcctctcactcacatgccagttcctggctggccagctgctcagggctcaggctggggcctcccattgacatcctccccctacactccctctctgagcctccgtcgcccctcctgttgggtaagggtgttgagtgtgacttgtgctgaaaacctggttcatatataataaataatggtgatgaaaagattaaaaaaaaaaaaaaaaaaaaaaaaaaaaaa

SEQ ID NO: 16 - DNA, 2272 bp, Homo sapiens
aatgcacagcggtattgatgagtagatccttggattcagaggttggctgaaacgcaccatgcctgcttccatcttttgctctgtaaagttgtgaattgctcatgcctatagggaggaaggatggcacatgggattccttctcaaggcaaagttaccataacggtggatgagtacagctcaaaccccacccaggcattcacgcactacaacatcaaccagagcagattccagcctccacatgtacatatggtcgaccccatcccatatgacactccaaaaccagcgggccacacgcggtttgtctgcatctcagacacacactccagaacagatggtatccagatgccttatggggacatccttctccacacaggcgatttcaccgagctgggactgccctcagaggttaagaagtttaatgactggttaggaaacctgccatatgaatataaaatagtgattgctgggaatcatgaactgacatttgataaggaattcatggcagaccttgttaaacaggactactaccgtttcccctctgtgtccaaattgaaaccagaggactttgacaatgttcagtccctcctgacaaacagtatttacttacaagattcggaggtaacagtgaagggattcaggatatacggtgcaccttggaccccgtggtttaatggatggggctttaacctacccagaggtcagtctctgctggacaagtggaacctcatccctgagggcattgacatactcatgacacatggacctcctctaggttttcgagactgggttccaaaggagcttcaaagagtgggctgtgtggagctgttaaacacggttcagaggcgagtccggcccaagctccatgtgtttggtggaatccatgaaggttatggcatcatgaccgacggttacacaacgtacatcaatgcctcgacgtgtacagtcagctttcaaccgaccaaccctccaattatatttgaccttccaaacccacagggttcctgaagctctaaatgccctattggaatgtgagggaaggtctataaactgccatttttctaattataaacttacattctcttacttatttacaaaccctgtgagttctttttgtaaattgttggaacacaaatgatgctagaggttgtgcttcttattttattttattttaaatggggcatccatttgaaatcagaggaacattgtgaatttgtaaaatgacttctgttttctcaaaggccatgccattgtaaattgttagtgttcgccaaaggacagccaagctttcttttaaaaagtgataaaagtcttattttaatatgctttaagctgaaagaaaaaaaaataagaaacaggcagtgttttaaaaaccaacacagatttgcacaactgtttaagagtattgtttgaaatattttaattttcaatgttttgttgttgttgttttcttggtaatgcttcttttttgcagatgtggtcccaatttatagcaatcttctcaacagaagtaggcatggaaaagacttcttttcatactctcactataaagaaagctgcattgagaagaaaatggctgtcatttaaaggatggtttaactagtgagattcctattgtggttatacaaggtctcattgtttgtttgtttcttttaaattatttcagctttaaaaatacagaaatggaatctgtcaagagcaggtatttcatacggttaaaaaaatgaacatgcagactccttttcaatatgggtttatatatataagtattttttgtgtattatgactacgttaggagtttaatattgtcaaggacagtacaactgcaaagggatgctgtatagcagcacatcagaagtcggaaggaactgacacattctctcagagctcaaggtcttaaagagcttgagttaaatctaggtacagttacaggcatgtatagacttaaatggatgcaatggaagctaactaaaataaggcttagttgtcctttctatttaaataccccaagttgtcttcttacttcctctcccctctcccattttgcactgtgtgtcgatgcaatcttcgctagcacaaaatattgtcgctaatagtcatttctgttttcccattgtaaatgctgttgagctttattctattttatgttactttgttaatgaaatttaggaaagcagttgtttctttaaatttattgtgatattctatatctagcggcctttatatgcaaataaaattgcaagatttttaaaaaaaaaaaaaaaaaaaaaaaaaa

SEQ ID NO: 17 - DNA, 2180 bp, Homo sapiens
cccggagccagcggttctccaagcacccagcatcctgctagacgcgccgcgcaccgacggaggggacatgggcagagcaatggtggccaggctcgggctggggctgctgctgctggcactgctcctacccacgcagatttattccagtgaaacaacaactggaacttcaagtaactcctcccagagtacttccaactctgggttggccccaaatccaactaatgccaccaccaaggcggctggtggtgccctgcagtcaacagccagtctcttcgtggtctcactctctcttctgcatctctactcttaagagactcaggccaagaaacgtcttctaaatttccccatcttctaaacccaatccaaatggcgtctggaagtccaatgtggcaaggaaaaacaggtcttcatcgaatctactaattccacaccttttattgacacagaaaatgttgagaatcccaaatttgattgatttgaagaacatgtgagaggtttgactagatgatggatgccaatattaaatctgctggagtttcatgtacaagatgaaggagaggcaacatccaaaatagttaagacatgatttccttgaatgtggcttgagaaatatggacacttaatactaccttgaaaataagaatagaaataaaggatgggattgtggaatggagattcagttttcatttggttcattaattctataaggccataaaacaggtaatataaaaagcttccatgattctatttatatgtacatgagaaggaacttccaggtgttactgtaattcctcaacgtattgtttcgacagcactaatttaatgccgatatactctagatgaagttttacattgttgagctattgctgttctcttgggaactgaactcactttcctcctgaggctttggatttgacattgcatttgaccttttatgtagtaattgacatgtgccagggcaatgatgaatgagaatctacccccagatccaagcatcctgagcaactcttgattatccatattgagtcaaatggtaggcatttcctatcacctgtttccattcaacaagagcactacattcatttagctaaacggattccaaagagtagaattgcattgaccgcgactaatttcaaaatgctttttattattattattttttagacagtctcactttgtcgcccaggccggagtgcagtggtgcgatctcagatcagtgtaccatttgcctcccgggctcaagcgattctcctgcctcagcctcccaagtagctgggattacaggcacctgccaccatgcccggctaatttttgtaattttagtagagacagggtttcaccatgttgcccaggctggtttcgaactcctgacctcaggtgatccacccgcctcggcctcccaaagtgctgggattacaggcttgagcccccgcgcccagccatcaaaatgctttttatttctgcatatgttgaatactttttacaatttaaaaaaatgatctgttttgaaggcaaaattgcaaatcttgaaattaagaaggcaaaaatgtaaaggagtcaaaactataaatcaagtatttgggaagtgaagacgaagctaatttgcattaaattcacaaacttttatactctttctgtatatacattttttttctttaaaaaacaactatggatcagaatagccacatttggaacactttttgttatcagtcaatatttttagatagttagaacctggtcctaagcctaaaagtgggcttgattctgcagtaaatcttttacaactgcctcgacacacataaacctttttaaaaatagacactccccgaagtcttttgttcgcatggtcacacactgatgcttagatgttccagtaatctaatatggccacagtagtcttgatgaccaaagtcctttttttccatctttagaaaactacatgggaacaaacagatcgaacagttttgaagctactgtgtgtgtgaatgaacactcttttgctttattccagaatgctgtacatctattttggattgtatattgtgtttgtgtatttacgctttgattcatagtaacttcttatggaattgatttgcattgaacacaaactgtaaataaaaagaaatggctgaaagagcaaaaaaaaaaaaaaaaaaaaaaaaaaaaaaaaaaaaaaaaaa

SEQ ID NO: 18 - DNA, 2374 bp, Homo sapiens
acctggtgcgggaggcccgggcagggagaagtgtgcggggccgggacaagccggctccgagtgcggggcgggaggggcctgcgcggcggcgggagcccagagccgcgctaaagcgggtcaagcgtcctccttttctccccgccccttctcctcctcctacctgggcctctgcgtggagacgcgcacctggcaaccggaggccgcgtctccgccttctctgctcgcgcctggcgcccggagcctgcccgggacctccgccggagccgcgctcgctgcaggcggcctcgagcgctctctcgttgatgccgttttggaggtgaccggcgcggcggccgctctatggtggggccgcgttagtggctgcggctccgcgggactccagggcgcggctgcgaggtggcggggcgccccgcctgcagaaccctgcttgcagctcaggtttcggggtgcttgaggaggccgccacggcagcgcgggagcggaagatgttggagctgaggcaccggggaagctgccccggccccagggaagcggtgtcgccgccacaccgcgagggagaggcggccggcggcgaccacgaaaccgagagcaccagcgacaaagaaacagatattgatgacagatatggagatttggattccagaacagattctgatattccggaaattccaccatcctcagatagaacccctgagattctcaaaaaagctctatctggtttatcttcaaggtggaaaaactggtggatacgtggaattctcactctaactatgatctcgttgtttttcctgatcatctatatgggatccttcatgctgatgcttcttgttctgggcatccaagtgaaatgcttccatgaaattatcactataggttatagagtctatcattcttatgatctaccatggtttagaacactaagttggtactttctattgtgtgtaaactactttttctatggagagactgtagctgattattttgctacatttgttcaaagagaagaacaacttcagttcctcattcgctaccatagatttatatcatttgccctctatctggcaggtttctgcatgtttgtactgagtttggtgaagaaacattatcgtctgcagttttatatgttcgcatggactcatgtcactttactgataactgtcactcagtcacaccttgtcatccaaaatctgtttgaaggcatgatatggttccttgttccaatatcaagtgttatctgcaatgacataactgcttacctttttggatttttttttgggagaactccattaattaagttgtctcctaaaaagacttgggaaggattcattggtggtttcttttccacagttgtgtttggattcattgctgcctatgtgttatccaaataccagtactttgtctgcccagtggaataccgaagtgatgtaaactccttcgtgacagaatgtgagccctcagaacttttccagcttcagacttactcacttccaccctttctaaaggcagtcttgagacaggaaagagtgagcttgtaccctttccagatccacagcattgcactgtcaacctttgcatctttaattggcccatttggaggcttctttgctagtggattcaaaagagccttcaaaatcaaggattttgcaaataccattcctggacatggtgggataatggacagatttgattgtcagtatttgatggcaacttttgtacatgtgtacatcacaagttttatccggggcccaaatcccagcaaagtgctacagcagttgttggtgcttcaacctgaacagcagttaaatatatataaaaccctgaagactcatctcattgagaaaggaatcctacaacccaccttgaaggtataactggatccagagagggaaggactgacaagaaggaattattcagaaaaacactgacagatgttttataaattgtacagaaaaatagttaaaaatgcaataggttgaagttttggagatatgtttctctctgaaattactgtgaatatttaacaaacacttacttgatctatgttatgaaataagtagcaaattgccagcaaaatgtcttgtaccttttctaaagtgtattttctgatgtgaacttccttccccttacttgctaggtttcataatttaaaagagtcaaacactataaaatgagtaagttgacgatgttttaagattgcacctggcagtgtgcctttttgcacaaatatttacttttgcacttggagctgcttttaattttagcaaaatgttttatgcaaggcacaataggaagtcagttctcctgcacttcctcctcatgtagtctggagtactttctaaagggcttagttggatttaaaaaaaaaaaaaaaaaa

SEQ ID NO: 19 - DNA, 2757 bp, Homo sapiens
ggttgtccacagtctcgtagctaccaagtgacaggccacgatttgatctcaggccagtgtgttaaactccaatttgcgtgctcctgtccctccccgcgcgtcggcggagctcggggccggactggacctgccgagggaggggcggacagtcctgacggtgcggggcggggctggcggctgcccaggcctggctgaggcgccgcggccgggtccctctccacctgccgggcggagcgcacgggccatgggctgagccccgctgagcccgccgggccggccatgggcgatcgcgagcgcaacaagaagcggctgctggagctgctgcgggcgccggacacaggcaacgcgcactgcgccgactgcggggcggcagatcccgactgggcctcttacaagctggggatcttcatctgtctcaactgctgcggcgtccaccgtaacttccctgacatcagcagagttaaatctgtgcgacttgacttctgggacgacagtattgtggagtttatgatccacaatggaaacctccgtgtgaaggccaagttcgaagccagagtcccagctttctactacatcccccaggccaacgactgcctggtcttaaaggaacaatggattcgagctaagtatgagagacgggaatttatggctgatggggaaaccatctcgctcccaggtaaccgagaaggattcctgtggaagcgaggaagggacaactcacagtttctgagaaggaagtttgtacttctggcaagagaaggcctcctgaagtacttcacaaaggaacagggtaaaagccccaaagctgtcatcagcattaaggacttgaatgccaccttccagacagagaagatagggcacccccatgggctgcagatcacctacaggagagatggccacaccaggaacctgtttgtgtatcatgaaagtgggaaggagatagtggactggttcaatgccctccgtgcagcccgtctgcagtacctaaaaatggcctttcctgaactcccagagtctgagctcgtgccattcctcaccaggaactacctcaaacaaggcttcatggaaaagactgggccaaagcagaaagaacctttcaagaaaaggtggttcgccctggattgccatgagcggaggctgctctattacaagaacccactggatgccttcgagcagggccaggtttttcttgggaacaaggagcagggatatgaagcctacgaagacctgcccaagggcatccgaggaaatcgctggaaagccggactcaccattgtcaccccagagcggagatttgtcctcacttgccccagtgagaaggaacagcaggaatggctggaaagtttgcggggtgtcctgtccagccccttgacgcccctcaaccggcttactgcatcaacagagagtggccgcagcagcaggtgacccattaactgaggaactggctgccactgaacacctggaactccttgtgggaagaagtttgcacctcggccctggctgcccaccatcagtgccccgcagtcagcagccattcctggcagtgaactctgccaggactgaagctgtggctttatccatcagctccctgggccttccccgcaacccacctcggggatctgaggatctggtgcatagatgaacatctatcccctcctcccccatacacacctaggcttgaaatgccctacaggcccagaactttctcacatctgaaatggaggcattgcaatgaaaaggcacccacagcatcatgcaagtggcatcttgtaaaaaaaaaaaaaaagtttaatctgaatctaaccatgaggaaataatcagacaaatccacattaggggcattctgctaaacatctgacccagactcttcaaaaatgaagagtgaaagataaagtagtcaatggccgggcgcagtgagattgcgccattgcattccagcctgggtgacagagcgagactccgtatcagaaagaaaaagaggaactgaatgaaatctcagatggctgaaatgttagagaaacagagcaccaagtcccctgctctgtgactcgttgttcctttcctctgtcttcaagcaccacgcagaaatacactggatgttctctctttgcttcaatggagacccaaggagctgggaggtctcttaagagactctctgattctccgtggctgggtgtgatggctcatgcccataatcccagccctttgggaagctgaggcaggaggattgagaccaggagttcgagaagagcctgggcaacatagtgagaccccatctctacaaagaaaaaaaaattagctggacatggtaatgaatgcctgtagtcccagctactccggacactgatgtgagaggatcacttgagccagggaggtcatggctacagtgacccctcattgcaccactttacttagcctgggtgacagagtgagaccctatctcaaaaaaaaaaaaaatctatgcattgtatgggactttcctttggatcccccaatcaaaggataagcaatgcgtaagcctgtgtccttcctgaagcttctcgactgcccagatagggaggtgagtcctctctatctcctctggctctggaagcaccttgaaaatgtgcattttcaaggacacttgctgggttgtgcattaagggccagtttacttgtctgcctctttgaccacctgtgaactctgttgggtgtactctgctaagttctggggatgaggaaattaataaaggtacagtcttgccttcaaaaaaaaaa

SEQ ID NO: 20 - DNA, 3445 bp, Homo sapiens
gagcaaccgcagcttctagtatccagactccagcgccgccccgggcgcggaccccaaccccgacccagagcttctccagcggcggcgcagcgagcagggctccccgccttaacttcctccgcggggcccagccaccttcgggagtccgggttgcccacctgcaaactctccgccttctgcacctgccacccctgagccagcgcgggcgcccgagcgagtcatggccaacgcggggctgcagctgttgggcttcattctcgccttcctgggatggatcggcgccatcgtcagcactgccctgccccagtggaggatttactcctatgccggcgacaacatcgtgaccgcccaggccatgtacgaggggctgtggatgtcctgcgtgtcgcagagcaccgggcagatccagtgcaaagtctttgactccttgctgaatctgagcagcacattgcaagcaacccgtgccttgatggtggttggcatcctcctgggagtgatagcaatctttgtggccaccgttggcatgaagtgtatgaagtgcttggaagacgatgaggtgcagaagatgaggatggctgtcattgggggtgcgatatttcttcttgcaggtctggctattttagttgccacagcatggtatggcaatagaatcgttcaagaattctatgaccctatgaccccagtcaatgccaggtacgaatttggtcaggctctcttcactggctgggctgctgcttctctctgccttctgggaggtgccctactttgctgttcctgtccccgaaaaacaacctcttacccaacaccaaggccctatccaaaacctgcaccttccagcgggaaagactacgtgtgacacagaggcaaaaggagaaaatcatgttgaaacaaaccgaaaatggacattgagatactatcattaacattaggaccttagaattttgggtattgtaatctgaagtatggtattacaaaacaaacaaacaaacaaaaaacccatgtgttaaaatactcagtgctaaacatggcttaatcttattttatcttctttcctcaatataggagggaagatttttccatttgtattactgcttcccattgagtaatcatactcaattgggggaaggggtgctccttaaatatatatagatatgtatatatacatgtttttctattaaaaatagacagtaaaatactattctcattatgttgatactagcatacttaaaatatctctaaaataggtaaatgtatttaattccatattgatgaagatgtttattggtatattttctttttcgtctatatatacatatgtaacagtcaaatatcatttactcttcttcattagctttgggtgcctttgccacaagacctagcctaatttaccaaggatgaattctttcaattcttcatgcgtgcccttttcatatacttattttattttttaccataatcttatagcacttgcatcgttattaagcccttatttgttttgtgtttcattggtctctatctcctgaatctaacacatttcatagcctacattttagtttctaaagccaagaagaatttattacaaatcagaactttggaggcaaatctttctgcatgaccaaagtgataaattcctgttgaccttcccacacaatccctgtactctgacccatagcactcttgtttgctttgaaaatatttgtccaattgagtagctgcatgctgttcccccaggtgttgtaacacaactttattgattgaatttttaagctacttattcatagttttatatccccctaaactacctttttgttccccattccttaattgtattgttttcccaagtgtaattatcatgcgttttatatcttcctaataaggtgtggtctgtttgtctgaacaaagtgctagactttctggagtgataatctggtgacaaatattctctctgtagctgtaagcaagtcacttaatctttctacctcttttttctatctgccaaattgagataatgatacttaaccagttagaagaggtagtgtgaatattaattagtttatattactctcattctttgaacatgaactatgcctatgtagtgtctttatttgctcagctggctgagacactgaagaagtcactgaacaaaacctacacacgtaccttcatgtgattcactgccttcctctctctaccagtctatttccactgaacaaaacctacacacataccttcatgtggttcagtgccttcctctctctaccagtctatttccactgaacaaaacctacgcacataccttcatgtggctcagtgccttcctctctctaccagtctatttccattctttcagctgtgtctgacatgtttgtgctctgttccattttaacaactgctcttacttttccagtctgtacagaatgctatttcacttgagcaagatgatgtaatggaaagggtgttggcattggtgtctggagacctggatttgagtcttggtgctatcaatcaccgtctgtgtttgagcaaggcatttggctgctgtaagcttattgcttcatctgtaagcggtggtttgtaattcctgatcttcccacctcacagtgatgttgtggggatccagtgagatagaatacatgtaagtgtggttttgtaatttaaaaagtgctatactaagggaaagaattgaggaattaactgcatacgttttggtgttgcttttcaaatgtttgaaaacaaaaaaaatgttaagaaatgggtttcttgccttaaccagtctctcaagtgatgagacagtgaagtaaaattgagtgcactaaacaaataagattctgaggaagtcttatcttctgcagtgagtatggcccgatgctttctgtggctaaacagatgtaatgggaagaaataaaagcctacgtgttggtaaatccaacagcaagggagatttttgaatcataataactcataaggtgctatctgttcagtgatgccctcagagctcttgctgttagctggcagctgacgctgctaggatagttagtttggaaatggtacttcataataaactacacaaggaaagtcagccactgtgtcttatgaggaattggacctaataaattttagtgtgccttccaaacctgagaatatatgcttttggaagttaaaatttaaatggcttttgccacatacatagatcttcatgatgtgtgagtgtaattccatgtggatatcagttaccaaacattacaaaaaaattttatggcccaaaatgaccaacgaaattgttacaatagaatttatccaattttgatctttttatattcttctaccacacctggaaacagaccaatagacattttggggttttataataggaatttgtataaagcattactctttttcaataaattgttttttaatttaaaaaaaggaaaaaaaaaaaaaaaaa

SEQ ID NO: 21 - DNA, 7291 bp, Homo sapiens
acacagtactctcagcttgttggtggaagcccctcatctgccttcattctgaaggcagggcccggcagaggaaggatcagagggtcgcggccggagggtcccggccggtggggccaactcagagggagaggaaagggctagagacacgaagaacgcaaaccatcaaatttagaagaaaaagccctttgactttttccccctctccctccccaatggctgtgtagcaaacatccctggcgataccttggaaaggacgaagttggtctgcagtcgcaatttcgtgggttgagttcacagttgtgagtgcggggctcggagatggagccgtggtcctctaggtggaaaacgaaacggtggctctgggatttcaccgtaacaaccctcgcattgaccttcctcttccaagctagagaggtcagaggagctgctccagttgatgtactaaaagcactagattttcacaattctccagagggaatatcaaaaacaacgggattttgcacaaacagaaagaattctaaaggctcagatactgcttacagagtttcaaagcaagcacaactcagtgccccaacaaaacagttatttccaggtggaactttcccagaagacttttcaatactatttacagtaaaaccaaaaaaaggaattcagtctttccttttatctatatataatgagcatggtattcagcaaattggtgttgaggttgggagatcacctgtttttctgtttgaagaccacactggaaaacctgccccagaagactatcccctcttcagaactgttaacatcgctgacgggaagtggcatcgggtagcaatcagcgtggagaagaaaactgtgacaatgattgttgattgtaagaagaaaaccacgaaaccacttgatagaagtgagagagcaattgttgataccaatggaatcacggtttttggaacaaggattttggatgaagaagtttttgagggggacattcagcagtttttgatcacaggtgatcccaaggcagcatatgactactgtgagcattatagtccagactgtgactcttcagcacccaaggctgctcaagctcaggaacctcagatagatgagtatgcaccagaggatataatcgaatatgactatgagtatggggaagcagagtataaagaggctgaaagtgtaacagagggacccactgtaactgaggagacaatagcacagacggaggcaaacatcgttgatgattttcaagaatacaactatggaacaatggaaagttaccagacagaagctcctaggcatgtttctgggacaaatgagccaaatccagttgaagaaatatttactgaagaatatctaacgggagaggattatgattcccagaggaaaaattctgaggatacactatatgaaaacaaagaaatagacggcagggattctgatcttctggtagatggagatttaggcgaatatgatttttatgaatataaagaatatgaagataaaccaacaagcccccctaatgaagaatttggtccaggtgtaccagcagaaactgatattacagaaacaagcataaatggccatggtgcatatggagagaaaggacagaaaggagaaccagcagtggttgagcctggtatgcttgtcgaaggaccaccaggaccagcaggacctgcaggtattatgggtcctccaggtctacaaggccccactggaccccctggtgaccctggcgataggggccccccaggacgtcctggcttaccaggggctgatggtctacctggtcctcctggtactatgttgatgttaccgttccgttatggtggtgatggttccaaaggaccaaccatctctgctcaggaagctcaggctcaagctattcttcagcaggctcggattgctctgagaggcccacctggcccaatgggtctaactggaagaccaggtcctgtgggggggcctggttcatctggggccaaaggtgagagtggtgatccaggtcctcagggccctcgaggcgtccagggtccccctggtccaacgggaaaacctggaaaaaggggtcgtccaggtgcagatggaggaagaggaatgccaggagaacctggggcaaagggagatcgagggtttgatggacttccgggtctgccaggtgacaaaggtcacaggggtgaacgaggtcctcaaggtcctccaggtcctcctggtgatgatggaatgaggggagaagatggagaaattggaccaagaggtcttccaggtgaagctggcccacgaggtttgctgggtccaaggggaactccaggagctccagggcagcctggtatggcaggtgtagatggccccccaggaccaaaagggaacatgggtccccaaggggagcctgggcctccaggtcaacaagggaatccaggacctcagggtcttcctggtccacaaggtccaattggtcctcctggtgaaaaaggaccacaaggaaaaccaggacttgctggacttcctggtgctgatgggcctcctggtcatcctgggaaagaaggccagtctggagaaaagggggctctgggtccccctggtccacaaggtcctattggatacccgggcccccggggagtaaagggagcagatggtgtcagaggtctcaagggatctaaaggtgaaaagggtgaagatggttttccaggattcaaaggtgacatgggtctaaaaggtgacagaggagaagttggtcaaattggcccaagaggggaagatggccctgaaggacccaaaggtcgagcaggcccaactggagacccaggtccttcaggtcaagcaggagaaaagggaaaacttggagttccaggattaccaggatatccaggaagacaaggtccaaagggttccactggattccctgggtttccaggtgccaatggagagaaaggtgcacggggagtagctggcaaaccaggccctcggggtcagcgtggtccaacgggtcctcgaggttcaagaggtgcaagaggtcccactgggaaacctgggccaaagggcacttcaggtggcgatggccctcctggccctccaggtgaaagaggtcctcaaggacctcagggtccagttggattccctggaccaaaaggccctcctggaccacctgggaaggatgggctgccaggacaccctgggcaacgtggggagactggatttcaaggcaagaccggccctcctgggccagggggagtggttggaccacagggaccaaccggtgagactggtccaataggggaacgtgggcatcctggccctcctggccctcctggtgagcaaggtcttcctggtgctgcaggaaaagaaggtgcaaagggtgatccaggtcctcaaggtatctcagggaaagatggaccagcaggattacgtggtttcccaggggaaagaggtcttcctggagctcagggtgcacctggactgaaaggaggggaaggtccccagggcccaccaggtccagttggctcaccaggagaacgtgggtcagcaggtacagctggcccaattggtttaccagggcgcccgggacctcagggtcctcctggtccagctggagagaaaggtgctcctggagaaaaaggtccccaagggcctgcagggagagatggagttcaaggtcctgttggtctcccagggccagctggtcctgccggctcccctggggaagacggagacaagggtgaaattggtgagccgggacaaaaaggcagcaagggtgacaagggagaaaatggccctcccggtcccccaggtcttcaaggaccagttggtgcccctggaattgctggaggtgatggtgaaccaggtcctagaggacagcaggggatgtttgggcaaaaaggtgatgagggtgccagaggcttccctggacctcctggtccaataggtcttcagggtctgccaggcccacctggtgaaaaaggtgaaaatggggatgttggtcccatggggccacctggtcctccaggcccaagaggccctcaaggtcccaatggagctgatggaccacaaggacccccagggtctgttggttcagttggtggtgttggagaaaagggtgaacctggagaagcagggaacccagggcctcctggggaagcaggtgtaggcggtcccaaaggagaaagaggagagaaaggggaagctggtccacctggagctgctggacctccaggtgccaaggggccaccaggtgatgatggccctaagggtaacccgggtcctgttggttttcctggagatcctggtcctcctggggaacctggccctgcaggtcaagatggtgttggtggtgacaagggtgaagatggagatcctggtcaaccgggtcctcctggcccatctggtgaggctggcccaccaggtcctcctggaaaacgaggtcctcctggagctgcaggtgcagagggaagacaaggtgaaaaaggtgctaagggggaagcaggtgcagaaggtcctcctggaaaaaccggcccagtcggtcctcagggacctgcaggaaagcctggtccagaaggtcttcggggcatccctggtcctgtgggagaacaaggtctccctggagctgcaggccaagatggaccacctggtcctatgggacctcctggcttacctggtctcaaaggtgaccctggctccaagggtgaaaagggacatcctggtttaattggcctgattggtcctccaggagaacaaggggaaaaaggtgaccgagggctccctggaactcaaggatctccaggagcaaaaggggatgggggaattcctggtcctgctggtcccttaggtccacctggtcctccaggtttaccaggtcctcaaggcccaaagggtaacaaaggctctactggacccgctggccagaaaggtgacagtggtcttccagggcctcctgggtctccaggtccacctggtgaagtcattcagcctttaccaatcttgtcctccaaaaaaacgagaagacatactgaaggcatgcaagcagatgcagatgataatattcttgattactcggatggaatggaagaaatatttggttccctcaattccctgaaacaagacattgagcatatgaaatttccaatgggtactcagaccaatccagcccgaacttgtaaagacctgcaactcagccatcctgacttcccagatggtgaatattggattgatcctaaccaaggttgctcaggagattccttcaaagtttactgtaatttcacatctggtggtgagacttgcatttatccagacaaaaaatctgagggagtaagaatttcatcatggccaaaggagaaaccaggaagttggtttagtgaatttaagaggggaaaactgctttcatacttagatgttgaaggaaattccatcaatatggtgcaaatgacattcctgaaacttctgactgcctctgctcggcaaaatttcacctaccactgtcatcagtcagcagcctggtatgatgtgtcatcaggaagttatgacaaagcacttcgcttcctgggatcaaatgatgaggagatgtcctatgacaataatccttttatcaaaacactgtatgatggttgtgcgtccagaaaaggctatgaaaagactgtcattgaaatcaatacaccaaaaattgatcaagtacctattgttgatgtcatgatcaatgactttggtgatcagaatcagaagttcggatttgaagttggtcctgtttgttttcttggctaagattaagacaaagaacatatcaaatcaacagaaaatataccttggtgccaccaacccattttgtgccacatgcaagttttgaataaggatggtatagaaaacaacgctgcatatacaggtaccatttaggaaataccgatgcctttgtgggggcagaatcacatggcaaaagctttgaaaatcataaagatataagttggtgtggctaagatggaaacagggctgattcttgattcccaattctcaactctccttttcctatttgaatttctttggtgctgtagaaaacaaaaaaagaaaaatatatattcataaaaaatatggtgctcattctcatccatccaggatgtactaaaacagtgtgtttaataaattgtaattattttgtgtacagttctatactgttatctgtgtccatttccaaaacttgcacgtgtccctgaattccatctgactctaattttatgagaattgcagaactctgatggcaataaatatatgtattatgaaaaaataaagttgtaatttctgatgactctaagtccctttctttggttaataataaaatgcctttgtatatattgatgttgaagagttcaattatttgatgtcgccaacaaaattctcagagggcaaaaatctggaagacttttggaagcacactctgatcaactcttctctgccgacagtcattttgctgaatttcagccaaaaatattatgcattttgatgctttattcaaggctatacctcaaactttttcttctcagaatccaggatttcacaggatacttgtatatatggaaaacaagcaagtttatatttttggacagggaaatgtgtgtaagaaagtatattaacaaatcaatgcctccgtcaagcaaacaatcatatgtatactttttttctacgttatctcatctccttgttttcagtgtgcttcaataatgcaggttaatattaaagatggaaattaagcaattatttatgaatttgtgcaatgttagattttcttatcaatcaagttcttgaatttgattctaagttgcatattataacagtctcgaaaattattttacttgcccaacaaatattacttttttcctttcaagataattttataaatcatttgacctacctaattgctaaatgaataacatatggtggactgttattaagagtatttgttttaagtcattcaggaaaatctaaacttttttttccactaaggtatttactttaaggtagcttgaaatagcaatacaatttaaaaattaaaaactgaattttgtatctattttaagtaatatatgtaagacttgaaaataaatgttttatttcttatataaagtgttaaattaattgataccagatttcactggaacagtttcaactgataatttatgacaaaagaacatacctgtaatattgaaattaaaaagtgaaatttgtcataaagaatttcttttatttttgaaatcgagtttgtaaatgtccttttaagaagggagatatgaatccaataaataaactcaagtcttggctacctgga

SEQ ID NO: 22 - DNA, 5222 bp, Homo sapiens
ttctgcccgccgccgccgctgccgagcgccgcctttgttccctgcaggaagggcgagcgcgcgggccagcgctcagccagcgcctcacgacccttcgtcctccgctaagctccaacgctctgctcgactagccgcgcgccttccggggctccgcagacccgcgagatggcaccaaggaggaacaacgggcagtgctggtgtctgctgatgctgctctcggtctccacgcccctccctgctgtcacccagacccgcggtgcgacagagactgcttcccagggtcacctggacctcacgcagctcatcggtgtcccgctgccctcgtccgtatcctttgtcacaggctatggtggcttcccggcctacagtttcgggcctggtgccaatgttggccgcccagccaggactctcatcccatccaccttcttcagggacttcgccatcagggtcgtggtgaagcccagcagcacccgtggtggcgtgctcttcgccatcactgacgccttccagaaggtcatctacctgggcctgcggctctcaggtgtggaggacggccaccagcggatcatcctctactacacggagccaggctcccatgtgtcccaagaagctgctgccttctcggtgcctgtgatgacccacaggtggaaccgcttcgccatgattgtccagggtgaggaagtgaccctcctcgtgaactgtgaggagcacagccgcatccccttccagcggtcctcccaggctttggcttttgagtccagcgctggaatcttcatgggcaatgcaggagctacagggctcgagagattcactggctccctccagcagctcaccgtgcaccccgaccccaggactcccgaggagctgtgtgaccctgaagagtcctcggcatctggagagaccagtgggctgcaggaggcagacggagtagctgagatcttagaagccgtcacctacactcaagcctcgcccaaagaagcaaaagttgaacccataaacacacctccaactccatcctccccctttgaagacatggaactttctggtgaacctgtacccgaggggaccctggaaaccaccaacatgagcatcatccagcacagcagccccaaacaagggtctggtgagatcctgaatgacacactggagggggttcattctgtggatggtgaccccattactgacagcggctcaggggctggggccttccttgacattgctgaagaaaagaatttagcagcaacagcagcggggctggccgaggtgcccatcagcactgctggagaagcagaggccagcagtgtgcccaccgggggaccaaccctctctatgtccacggagaacccagaggaaggggtcactccaggtccagataatgaagagcgtttacgagcaacagcagcaggggaggccgaggcactcgccagcatgcctggggaagtggaggccagtggtgtggcccccggggagctggacctctccatgtccgcccagagcctcggggaagaggccactgtgggtccaagcagtgaagacagtttaacaacagctgcagctgcaaccgaagtgtccctcagtacttttgaggatgaggaagccagtggggtccccacagatggcctggctcccctcacagccaccatggcccctgagcgggcagtcacttctggtcctggtgatgaagaagacttggcagcagccacaacagaggagcccctcatcacagctgggggtgaagagtccggcagccctccccctgatgggccaccgctgcccctgcccacagtggctcctgaaagatggatcactccagctcaaagagaacatgtgggaatgaaaggacaggctgggcccaaaggagaaaagggtgatgctggggaggagcttcctggccctcctgaaccttctgggcctgttggacccacggcaggagcagaagcagagggctctggcctaggctggggctcggacgtcggctctggctctggtgacctggtgggcagtgagcagctgctgagaggtcctccaggacccccagggccacctggcttacctgggattccaggaaaaccaggaactgatgttttcatgggaccccctggatctcctggagaggatggacctgctggtgaacctgggcccccgggccctgagggacagcctggagttgatggagccaccggccttcccgggatgaaaggggagaagggagcaagagggcctaatggctcagttggtgaaaagggtgaccctggcaacagaggcttacctggacccccggggaaaaagggacaagctggccctcctggggtcatgggacccccagggcctcctggaccccctgggcccccaggccctggatgcacaatgggacttggattcgaggataccgaaggctctggaagcacccagctattgaatgaacccaaactctccagaccaacggctgcaattggtctcaaaggagagaaaggagaccggggacccaagggagaaagggggatggatggagccagtattgtgggaccccctgggccgagagggccacctgggcacatcaaggtcttgtctaattccttgatcaatatcacccatggattcatgaatttctcggacattcctgagctggtggggcctccggggccggacgggttgcctgggctgccaggatttccaggtcctagaggaccaaaaggtgacactggtttacctggctttccaggactaaaaggagaacagggcgagaagggagagccgggtgccatcctgacagaggacattcctctggaaaggctgatggggaaaaagggtgaacctggaatgcatggagccccaggaccaatggggcccaaaggaccaccaggacataaaggagaatttggccttcccgggcgacctggtcgcccaggactgaatggcctcaagggtaccaaaggagatccaggggtcattatgcagggcccacctggcttacctggccctccaggcccccctgggccacctggagctgtgattaacatcaaaggagccattttcccaatacccgtccgaccacactgcaaaatgccagttgatactgctcatcctgggagtccagagctcatcacttttcacggtgttaaaggagagaaaggatcctggggtcttcctggctcaaagggagaaaaaggcgaccagggagcccagggaccaccaggtcctccacttgatctagcttacctgagacactttctgaacaacttgaagggggagaatggagacaaggggttcaaaggtgaaaaaggagaaaaaggagacattaatggcagcttccttatgtctgggcctccaggcctgcccggaaatccaggcccggctggccaaaaaggggagacagtcgttgggccccaaggacccccaggtgctcctggtctgcctgggccacctggctttggaagacctggtgatcctgggccaccggggcccccggggccaccaggacctccagctatcctgggagcagctgtggcccttccaggtccccctggccctccaggacagccagggcttcccggatccagaaacctggtcacagcattcagcaacatggatgacatgctgcagaaagcgcatttggttatagaaggaacattcatctacctgagggacagcactgagtttttcattcgtgttagagatggctggaaaaaattacagctgggagaactgatccccattcctgccgacagccctccaccccctgcgctttccagcaacccacatcagcttctgcctccaccaaaccctatttcaagtgccaattatgagaagcctgctctgcatttggctgctctgaacatgccattttctggggacattcgagctgattttcagtgcttcaagcaggccagagctgcaggactgttgtccacctaccgagcattcttatcttcccatttgcaagatctgtccaccattgtgaggaaagcagagagatacagccttcccatagtgaacctcaagggccaagtactttttaataattgggactcaattttttctggccacggaggtcagttcaatatgcatattccaatatactcctttgatggtcgagacataatgacagatccttcttggccccagaaagtcatttggcatggctccagcccccatggcgtccgccttgtggataactactgtgaagcatggcgaaccgcggacacagcggtcacgggacttgcctccccgctgagcacggggaagattctggaccagaaagcatacagctgtgctaatcggctaattgtcctatgtatcgaaaacagtttcatgacagacgctaggaagtaatggccttctgatgattcttaaagagttttcaattttttcttatgtgaagagttgacactgaaatctaaaatgtttaattgttgtaaatattacagtttttttttttttactacatattctttacaacagcaaccaaagaaaacatacctcaatacactcaaaactgaagacatagaggactcagatcaaagacaaaatctgatccatatattggtgctagattctgcaggaaaccccagcagtgtgaacgcatcccaacataggttaagagcaagttgaaaacaaaggccagattctgccactgcatccttcagacagttatatcctccttttaaaccattgttgttgagtgtaagatgtccttcatgttttcttataaagtcagtgtttagaaatgttaccctttctaagttatatacagatcaaatgcttttttctttcacgtacatccatcatttgcaactgctgttcgtacacagaaacaggactgctcaaatgatcctatttgtattttctgatgctatcagactctaatgtttttttccctaaaatattattgccatcatgctttaggaatttttatatttttacacaatcatattttagtatggtgtctgtttatgtaactctgacttgctggaaaagttgaaactccaaataatctgaaactagaaaagaaatagcacataattactaccttccccttggcggctctcctcccccaacccccaccccacaattttatgacttccatttggcaattgttgaattataactgcgactgaaacaaacaggttcatagagatgaattttctgagaaacatatatctacatgttgtataattggattttttttccatgtaagtgaacataaaaacatcttttccggg

SEQ ID NO: 23 - DNA, 6366 bp, Homo sapiens
ggggctggccgaggctgcggcgtttctccccaaggaagtgtcttctccgctttccctgttcttctgtttctcacacactttctatctcattctgtaactttcaagcctttccttctaactgtatgtatttagttacttgttttcaagctggttccctctctggccccctggcctggggaaagcctccacacttactgcgggtcttgtttagagtctgagtttgtgagattatttggggcagagtgggcgagtggctgacaggtgacccccaggaggaggattcctggggctggtgtcttctcccagctgctgcttccagtgggcctgggcccaggactggacctccgctggcacccctgagtgcctccctgccaggccatgctgctgtagaccctaacagcgtctcttcctggccaagagaagcctgtccccaagaacaggagagccatggccggcctccgagggaacgctgtggctggcctcctctggatgctgctgctgtggagtgggggcggcggctgccaggctcagcgggcaggttgcaaaagtgtccactacgatctggtcttcctcctggacacctcctccagcgtgggcaaggaggactttgagaaggtccggcagtgggtggccaacctggtggacaccttcgaggtgggccccgaccgcacccgtgtgggggtcgtgcgctacagcgaccggcccaccacggccttcgagttgggactctttggctcgcaggaggaggtcaaggcggctgcccggcgtctcgcctaccacgggggcaacaccaacacgggagacgcgctccgctacatcacggcccgcagcttctccccacacgccggcggccgccccagggaccgcgcctacaagcaggtggccatcctgctcaccgacggccgcagccaggacctggtgctggacgccgcggcggcagcccaccgcgctggcatccgcatctttgccgtgggcgtgggcgaggcactcaaggaggagctggaggagatcgcctcagagcccaagtccgcccacgtcttccacgtgtccgacttcaatgccatcgacaagatccggggcaagctgcggcgccgtctttgtgaaaatgtgctctgtcctagcgttcgtgtagaaggagatcgctttaagcacaccaatggaggaaccaaggaaatcacaggttttgacctgatggatttgttcagtgtgaaggaaatcttggggaagagagagaatggagctcagagttcctatgtacggatgggatccttccctgtggtgcaaagtactgaggatgtgttcccccaaggtttacctgatgagtacgcctttgtcacaaccttccggttcaggaaaacctctcggaaggaagactggtatatctggcaggtcatcgaccagtacagcatcccacaggtctccatccggctggatggtgaaaacaaggcagtcgagtacaacgctgtgggtgccatgaaagatgctgtcagggtggtcttccgaggttctcgggtcaatgacctctttgaccgggactggcacaagatggccctgagcatccaggcccagaacgtctccctgcacattgactgtgcgctggtgcagacactacccatcgaggaacgggagaacattgacatccagggcaagactgtgattggcaagcgcctctacgacagtgtgcccattgactttgacctacagcggattgtgatctattgtgactcgagacacgcagaattggagacttgttgtgatatcccctcgggtccgtgccaggtgaccgtggtgacagagcctccacctccacccccaccccagcggcctcccaccccaggcagtgaacagattgggtttttgaagaccatcaactgctcctgcccagctggagagaagggtgaaatgggagttgctggccccatggggctccctggtccaaagggagacataggagccattgggccggttggcgctcctggacctaagggagagaaaggtgatgtgggcataggaccttttggccaaggggaaaagggtgaaaagggttccctgggcctgcccggcccccctgggagagacggcagcaaaggcatgagaggggagccaggagagctgggagagccggggctgccgggtgaggtcggcatgcgggggccccaaggaccacctggactccccggacctcctggacgtgtcggagctcctggtctccaaggagaacgaggtgaaaagggaactcgaggagaaaagggagagcgaggcctggatggattccctgggaagcctggggacacaggacagcagggcaggcccggcccttctggtgtggcaggaccccagggagaaaagggtgacgtgggacctgcggggccacctggtgtaccaggctcagtggtgcagcaagagggcttgaaaggggaacagggagctccaggacccagaggtcaccaaggcgcccccggtcctccaggagctcggggtccaataggcccagaaggcagggatggacctcctggtttgcaaggtctccgagggaagaaaggtgacatgggaccacctggaatccctggattgctggggctgcagggccctccaggaccccctggtgtcccaggcccccctggaccgggaggttctccgggtttgcctggagagatcggcttcccgggaaagcctggacctcctgggcccacgggaccccctggaaaggacgggccaaatggaccaccaggtccgccaggaaccaagggagaaccaggagaaagaggggaagatggtctgcctggaaaaccaggccttcggggagaaattggggagcagggcctggcaggccgacctggagagaagggagaagcaggcctcccaggggctccaggcttcccaggtgtgagaggagagaaaggagaccagggagaaaaaggtgaactgggacttccaggactgaaaggtgaccgaggtgaaaagggtgaagctggtcctgcaggccctcccgggttacctggaactacatccctgttcacaccacatccacggatgcccggagaacaagggcccaaaggagagaagggcgatccaggcctgcctggggaaccgggactgcagggccgtcctggagaattggggcctcagggacccactggaccaccgggtgccaagggacaggaaggtgcacatggggctcctggagcagctggaaaccccggtgctcccggacatgtcggtgcccccggtcccagtggccctccaggaagtgtgggtgctcccggcctcagaggcaccccagggaaagatggggagcgtggtgagaagggtgcagcgggggaagaaggcagcccagggccagttggtcccaggggagatcctggtgctcctgggctccctgggccgcccggaaaagggaaggatggagagccgggactccgtggatcacctggactccctggacccctaggaaccaaggctgcttgcggaaaagtcagagggtcagaaaactgtgcactgggagggcaatgtgttaagggggatcgaggagctcctgggatccctggttctcctggcagccgtggtgacccaggcattggggttgctggccctcctggcccttccggaccaccaggagacaaaggatccccgggatcacgaggcttacctggattccctggcccccagggcccagccggccgggacggtgcaccaggaaatccaggagaaagagggcctcctggcaagccgggcctctcttcactactgtctccaggggacataaatctcttggctaaggatgtgtgcaatgactgccctcctggccccccaggcctccctggtctaccaggttttaaaggggacaaaggtgtcccaggaaagccagggagagaaggcacagaagggaaaaagggagaggctgggcctccaggcctaccagggcccccaggaatagctggaccacagggaagtcaaggagaacgtggtgcagatggtgaggttgggcagaaaggtgatcagggtcatcctggagttccaggtttcatggggcccccagggaaccccgggccaccaggggcagatggaattgcaggagctgctggaccaccaggaatccaagggtcacctgggaaagaaggccctcctggcccccaaggcccatctggattacccggaatcccaggagaagaaggcaaagagggcagagatggaaagccgggtccccctggagagccgggcaaagcaggagagccaggtctaccaggaccagagggtgcccgaggcccacctggcttcaagggacacacaggcgattctggtgcacccggtccccggggagagtctggtgccatggggcttcctggtcaggaagggttaccaggaaaagatggtgacactggacccactgggccacagggtccccaaggaccaaggggcccaccgggcaagaatggatcaccgggatctccaggagagcctggcccttcaggaacccctggccagaaaggaagcaaaggggaaaatggcagcccaggacttcctggcttcctgggtccccgtgggcctccgggagaaccaggagagaaaggagtcccaggcaaggagggggtccctgggaagcctggagagcctggattcaaaggagaaaggggagatcctgggatcaaaggtgacaaaggacctcctggtggaaaaggccagcctggggaccctggaatcccaggccacaaaggccacacaggcctgatgggtccccaaggactacctggggagaatggaccagttggacccccagggcctccaggccagccgggatttccaggactgaggggggagtctccatccatggaaaccctgcgtcggcttattcaagaagagctggggaagcagcttgaaaccagactcgcctacctcctggcccagatgcccccggcgtacatgaagtcatctcaaggcagacctgggcccccagggccccctggaaaagatgggcttccaggccgggccggccccatgggggagccaggtcgtcctgggcaggggggtctggaaggaccctctggacccataggtcccaaaggtgagcgaggagccaaaggtgacccaggtgcacctggagttggcctccgaggcgagatgggaccccctggaatcccaggtcaacccggggaacctggctatgctaaagatggacttcctgggatccctggccctcaaggggagacaggaccagctggacatcctggcctcccaggacctcccggtcccccaggccaatgtgacccttcccagtgtgcctacttcgccagccttgctgcccggccgggtaatgtgaagggtccctaaaggactctggaaagccagaagactgcagtggatttctgaaacttgaactcagagcccagtgggaagccagaggtcttgaaagacttcagccatgtgttccttttttttttctttcttttatcgtttgctttttgttttattttcttgagagacctcaaaattattaaatccaacagacgctgccggtcggtcagattattattaatattattgttgttgttaattattattattatttcatatgctgatgctttgtgagttcttttccactcctttaaagttgggaaaacttgattcgtggggcaggagattgtttcttcattcttctgacagcccccatctgacgcgtaactgcccattttaaggaaactcttggtgctacaaaaccctgaccagacacttggcaaatttacctctttcttcaaaagaaaaactttaagaaaatgagccaatgggcttcattctcagtcatgcccggagatcacccaggagaaataatacaaacaccaccactgtccagagagagtaaagaagcagaaagagaaagaatttgcaaccatgaggaatgttcccacctcccgacgggacgtgcatttggaaaacacagaatcagccctcagggtgcactccagccacctcagtgctctaagctcacagaagtgaaataatgtctgtgggttggcaatggctttgtgggatcatatgtcttggccaaagatgggaaaacctatgttgaagaggcagcccttgagtgttaatttgtcttctaaactgtgtaaggccccttcaagttcctcttgttggtttcaattatattaattataaaacaagtggatgtggtgaccatccacttgtgtttccctaatgatgggcagttggccagggcactgaccagagctgggaaatttgtatctccaaggcggctctgtctctgaaataaatggcatcaagtgcatgtgtgtatgcgacatgccctgcctgaacaggtgctcaataaatccaagtttccttctcttgaaaaaaaaaaaaaaaaaaaaa

SEQ ID NO: 24 - DNA, 11185 bp, Homo sapiens
gctgccccgagcctttctggggaagaactccaggcgtgcggacgcaacagccgagaacattaggtgttgtggacaggagctgggaccaagatcttcggccagccccgcatcctcccgcatcttccagcaccgtcccgcaccctccgcatccttccccgggccaccacgcttcctatgtgacccgcctgggcaacgccgaacccagtcgcgcagcgctgcagtgaattttccccccaaactgcaataagccgccttccaaggccaagatgttcataaatataaagagcatcttatggatgtgttcaaccttaatagtaacccatgcgctacataaagtcaaagtgggaaaaagcccaccggtgaggggctccctctctggaaaagtcagcctaccttgtcatttttcaacgatgcctactttgccacccagttacaacaccagtgaatttctccgcatcaaatggtctaagattgaagtggacaaaaatggaaaagatttgaaagagactactgtccttgtggcccaaaatggaaatatcaagattggtcaggactacaaagggagagtgtctgtgcccacacatcccgaggctgtgggcgatgcctccctcactgtggtcaagctgctggcaagtgatgcgggtctttaccgctgtgacgtcatgtacgggattgaagacacacaagacacggtgtcactgactgtggatggggttgtgtttcactacagggcggcaaccagcaggtacacactgaattttgaggctgctcagaaggcttgtttggacgttggggcagtcatagcaactccagagcagctctttgctgcctatgaagatggatttgagcagtgtgacgcaggctggctggctgatcagactgtcagatatcccatccgggctcccagagtaggctgttatggagataagatgggaaaggcaggagtcaggacttatggattccgttctccccaggaaacttacgatgtgtattgttatgtggatcatctggatggtgatgtgttccacctcactgtccccagtaaattcaccttcgaggaggctgcaaaagagtgtgaaaaccaggatgccaggctggcaacagtgggggaactccaggcggcatggaggaacggctttgaccagtgcgattacgggtggctgtcggatgccagcgtgcgccaccctgtgactgtggccagggcccagtgtggaggtggtctacttggggtgagaaccctgtatcgttttgagaaccagacaggcttccctccccctgatagcagatttgatgcctactgctttaaacctaaagaggctacaaccatcgatttgagtatcctcgcagaaactgcatcacccagtttatccaaagaaccacaaatggtttctgatagaactacaccaatcatccctttagttgatgaattacctgtcattccaacagagttccctcccgtgggaaatattgtcagttttgaacagaaagccacagtccaacctcaggctatcacagatagtttagccaccaaattacccacacctactggcagtaccaagaagccctgggatatggatgactactcaccttctgcttcaggacctcttggaaagctagacatatcagaaattaaggaagaagtgctccagagtacaactggcgtctctcattatgctacggattcatgggatggtgtcgtggaagataaacaaacacaagaatcggttacacagattgaacaaatagaagtgggtcctttggtaacatctatggaaatcttaaagcacattccttccaaggaattccctgtaactgaaacaccattggtaactgcaagaatgatcctggaatccaaaactgaaaagaaaatggtaagcactgtttctgaattggtaaccacaggtcactatggattcaccttgggagaagaggatgatgaagacagaacacttacagttggatctgatgagagcaccttgatctttgaccaaattcctgaagtcattacggtgtcaaagacttcagaagacaccatccacactcatttagaagacttggagtcagtctcagcatccacaactgtttcccctttaattatgcctgataataatggatcatccatggatgactgggaagagagacaaactagtggtaggataacggaagagtttcttggcaaatatctgtctactacaccttttccatcacagcatcgtacagaaatagaattgtttccttattctggtgataaaatattagtagagggaatttccacagttatttatccttctctacaaacagaaatgacacatagaagagaaagaacagaaacactaataccagagatgagaacagatacttatacagatgaaatacaagaagagatcactaaaagtccatttatgggaaaaacagaagaagaagtcttctctgggatgaaactctctacatctctctcagagccaattcatgttacagagtcttctgtggaaatgaccaagtcttttgatttcccaacattgataacaaagttaagtgcagagccaacagaagtaagagatatggaggaagactttacagcaactccaggtactacaaaatatgatgaaaatattacaacagtgcttttggcccatggtactttaagtgttgaagcagccactgtatcaaaatggtcatgggatgaagataatacaacatccaagcctttagagtctacagaaccttcagcctcttcaaaattgccccctgccttactcacaactgtggggatgaatggaaaggataaagacatcccaagtttcactgaagatggagcagatgaatttactcttattccagatagtactcaaaagcagttagaggaggttactgatgaagacatagcagcccatggaaaattcacaattagatttcagccaactacatcaactggtattgcagaaaagtcaactttgagagattctacaactgaagaaaaagttccacctatcacaagcactgaaggccaagtttatgcaaccatggaaggaagtgctttgggtgaagtagaagatgtggacctctctaagccagtatctactgttccccaatttgcacacacttcagaggtggaaggattagcatttgttagttatagtagcacccaagagcctactacttatgtagactcttcccataccattcctctttctgtaattcccaagacagactggggagtgttagtaccttctgttccatcagaagatgaagttctaggtgaaccctctcaagacatacttgtcattgatcagactcgccttgaagcgactatttctccagaaactatgagaacaacaaaaatcacagagggaacaactcaggaagaattcccttggaaagaacagactgcagagaaaccagttcctgctctcagttctacagcttggactcccaaggaggcagtaacaccactggatgaacaagagggcgatggatcagcatatacagtctctgaagatgaattgttgacaggttctgagagggtcccagttttagaaacaactccagttggaaaaattgatcacagtgtgtcttatccaccaggtgctgtaactgagcacaaagtgaaaacagatgaagtggtaacactaacaccacgcattgggccaaaagtatctttaagtccagggcctgaacaaaaatatgaaacagaaggtagtagtacaacaggatttacatcatctttgagtccttttagtacccacattacccagcttatggaagaaaccactactgagaaaacatccctagaggatattgatttaggctcaggattatttgaaaagcccaaagccacagaactcatagaattttcaacaatcaaagtcacagttccaagtgatattaccactgccttcagttcagtagacagacttcacacaacttcagcattcaagccatcttccgcgatcactaagaaaccacctctcatcgacagggaacctggtgaagaaacaaccagtgacatggtaatcattggagaatcaacatctcatgttcctcccactacccttgaagatattgtagccaaggaaacagaaaccgatattgatagagagtatttcacgacttcaagtcctcctgctacacagccaacaagaccacccactgtggaagacaaagaggcctttggacctcaggcgctttctacgccacagcccccagcaagcacaaaatttcaccctgacattaatgtttatattattgaggtcagagaaaataagacaggtcgaatgagtgatttgagtgtaattggtcatccaatagattcagaatctaaagaagatgaaccttgtagtgaagaaacagatccagtgcatgatctaatggctgaaattttacctgaattccctgacataattgaaatagacctataccacagtgaagaaaatgaagaagaagaagaagagtgtgcaaatgctactgatgtgacaaccaccccatctgtgcagtacataaatgggaagcatctcgttaccactgtgcccaaggacccagaagctgcagaagctaggcgtggccagtttgaaagtgttgcaccttctcagaatttctcggacagctctgaaagtgatactcatccatttgtaatagccaaaacggaattgtctactgctgtgcaacctaatgaatctacagaaacaactgagtctcttgaagttacatggaagcctgagacttaccctgaaacatcagaacatttttcaggtggtgagcctgatgttttccccacagtcccattccatgaggaatttgaaagtggaacagccaaaaaaggggcagaatcagtcacagagagagatactgaagttggtcatcaggcacatgaacatactgaacctgtatctctgtttcctgaagagtcttcaggagagattgccattgaccaagaatctcagaaaatagcctttgcaagggctacagaagtaacatttggtgaagaggtagaaaaaagtacttctgtcacatacactcccactatagttccaagttctgcatcagcatatgtttcagaggaagaagcagttaccctaataggaaatccttggccagatgacctgttgtctaccaaagaaagctgggtagaagcaactcctagacaagttgtagagctctcagggagttcttcgattccaattacagaaggctctggagaagcagaagaagatgaagatacaatgttcaccatggtaactgatttatcacagagaaatactactgatacactcattactttagacactagcaggataatcacagaaagcttttttgaggttcctgcaaccaccatttatccagtttctgaacaaccttctgcaaaagtggtgcctaccaagtttgtaagtgaaacagacacttctgagtggatttccagtaccactgttgaggaaaagaaaaggaaggaggaggagggaactacaggtacggcttctacatttgaggtatattcatctacacagagatcggatcaattaattttaccctttgaattagaaagtccaaatgtagctacatctagtgattcaggtaccaggaaaagttttatgtccttgacaacaccaacacagtctgaaagggaaatgacagattctactcctgtctttacagaaacaaatacattagaaaatttgggggcacagaccactgagcacagcagtatccatcaacctggggttcaggaagggctgaccactctcccacgtagtcctgcctctgtctttatggagcagggctctggagaagctgctgccgacccagaaaccaccactgtttcttcattttcattaaacgtagagtatgcaattcaagccgaaaaggaagtagctggcactttgtctccgcatgtggaaactacattctccactgagccaacaggactggttttgagtacagtaatggacagagtagttgctgaaaatataacccaaacatccagggaaatagtgatttcagagcgattaggagaaccaaattatggggcagaaataaggggcttttccacaggttttcctttggaggaagatttcagtggtgactttagagaatactcaacagtgtctcatcccatagcaaaagaagaaacggtaatgatggaaggctctggagatgcagcatttagggacacccagacttcaccatctacagtacctacttcagttcacatcagtcacatatctgactcagaaggacccagtagcaccatggtcagcacttcagccttcccctgggaagagtttacatcctcagctgagggctcaggtgagcaactggtcacagtcagcagctctgttgttccagtgcttcccagtgctgtgcaaaagttttctggtacagcttcctccattatcgacgaaggattgggagaagtgggtactgtcaatgaaattgatagaagatccaccattttaccaacagcagaagtggaaggtacgaaagctccagtagagaaggaggaagtaaaggtcagtggcacagtttcaacaaactttccccaaactatagagccagccaaattatggtctaggcaagaagtcaaccctgtaagacaagaaattgaaagtgaaacaacatcagaggaacaaattcaagaagaaaagtcatttgaatcccctcaaaactctcctgcaacagaacaaacaatctttgattcacagacatttactgaaactgaactcaaaaccacagattattctgtactaacaacaaagaaaacttacagtgatgataaagaaatgaaggaggaagacacttctttagttaacatgtctactccagatccagatgcaaatggcttggaatcttacacaactctccctgaagctactgaaaagtcacattttttcttagctactgcattagtaactgaatctataccagctgaacatgtagtcacagattcaccaatcaaaaaggaagaaagtacaaaacattttccgaaaggcatgagaccaacaattcaagagtcagatactgagctcttattctctggactgggatcaggagaagaagttttacctactctaccaacagagtcagtgaattttactgaagtggaacaaatcaataacacattatatccccacacttctcaagtggaaagtacctcaagtgacaaaattgaagactttaacagaatggaaaatgtggcaaaagaagttggaccactcgtatctcaaacagacatctttgaaggtagtgggtcagtaaccagcacaacattaatagaaattttaagtgacactggagcagaaggacccacggtggcacctctccctttctccacggacatcggacatcctcaaaatcagactgtcaggtgggcagaagaaatccagactagtagaccacaaaccataactgaacaagactctaacaagaattcttcaacagcagaaattaacgaaacaacaacctcatctactgattttctggctagagcttatggttttgaaatggccaaagaatttgttacatcagcaccaaaaccatctgacttgtattatgaaccttctggagaaggatctggagaagtggatattgttgattcatttcacacttctgcaactactcaggcaaccagacaagaaagcagcaccacatttgtttctgatgggtccctggaaaaacatcctgaggtgccaagcgctaaagctgttactgctgatggattcccaacagtttcagtgatgctgcctcttcattcagagcagaacaaaagctcccctgatccaactagcacactgtcaaatacagtgtcatatgagaggtccacagacggtagtttccaagaccgtttcagggaattcgaggattccaccttaaaacctaacagaaaaaaacccactgaaaatattatcatagacctggacaaagaggacaaggatttaatattgacaattacagagagtaccatccttgaaattctacctgagctgacatcggataaaaatactatcatagatattgatcatactaaacctgtgtatgaagacattcttggaatgcaaacagatatagatacagaggtaccatcagaaccacatgacagtaatgatgaaagtaatgatgacagcactcaagttcaagagatctatgaggcagctgtcaacctttctttaactgaggaaacatttgagggctctgctgatgttctggctagctacactcaggcaacacatgatgaatcaatgacttatgaagatagaagccaactagatcacatgggctttcacttcacaactgggatccctgctcctagcacagaaacagaattagacgttttacttcccacggcaacatccctgccaattcctcgtaagtctgccacagttattccagagattgaaggaataaaagctgaagcaaaagccctggatgacatgtttgaatcaagcactttgtctgatggtcaagctattgcagaccaaagtgaaataataccaacattgggccaatttgaaaggactcaggaggagtatgaagacaaaaaacatgctggtccttcttttcagccagaattctcttcaggagctgaggaggcattagtagaccatactccctatctaagtattgctactacccaccttatggatcagagtgtaacagaggtgcctgatgtgatggaaggatccaatcccccatattacactgatacaacattagcagtttcaacatttgcgaagttgtcttctcagacaccatcatctcccctcactatctactcaggcagtgaagcctctggacacacagagatcccccagcccagtgctctgccaggaatagacgtcggctcatctgtaatgtccccacaggattcttttaaggaaattcatgtaaatattgaagcaactttcaaaccatcaagtgaggaataccttcacataactgagcctccctctttatctcctgacacaaaattagaaccttcagaagatgatggtaaacctgagttattagaagaaatggaagcttctcccacagaacttattgctgtggaaggaactgagattctccaagatttccaaaacaaaaccgatggtcaagtttctggagaagcaatcaagatgtttcccaccattaaaacacctgaggctggaactgttattacaactgccgatgaaattgaattagaaggtgctacacagtggccacactctacttctgcttctgccacctatggggtcgaggcaggtgtggtgccttggctaagtccacagacttctgagaggcccacgctttcttcttctccagaaataaaccctgaaactcaagcagctttaatcagagggcaggattccacgatagcagcatcagaacagcaagtggcagcgagaattcttgattccaatgatcaggcaacagtaaaccctgtggaatttaatactgaggttgcaacaccaccattttcccttctggagacttctaatgaaacagatttcctgattggcattaatgaagagtcagtggaaggcacggcaatctatttaccaggacctgatcgctgcaaaatgaacccgtgccttaacggaggcacctgttatcctactgaaacttcctacgtatgcacctgtgtgccaggatacagcggagaccagtgtgaacttgattttgatgaatgtcactctaatccctgtcgtaatggagccacttgtgttgatggttttaacacattcaggtgcctctgccttccaagttatgttggtgcactttgtgagcaagataccgagacatgtgactatggctggcacaaattccaagggcagtgctacaaatactttgcccatcgacgcacatgggatgcagctgaacgggaatgccgtctgcagggtgcccatctcacaagcatcctgtctcacgaagaacaaatgtttgttaatcgtgtgggccatgattatcagtggataggcctcaatgacaagatgtttgagcatgacttccgttggactgatggcagcacactgcaatacgagaattggagacccaaccagccagacagcttcttttctgctggagaagactgtgttgtaatcatttggcatgagaatggccagtggaatgatgttccctgcaattaccatctcacctatacgtgcaagaaaggaacagttgcttgcggccagccccctgttgtagaaaatgccaagacctttggaaagatgaaacctcgttatgaaatcaactccctgattagataccactgcaaagatggtttcattcaacgtcaccttccaactatccggtgcttaggaaatggaagatgggctatacctaaaattacctgcatgaacccatctgcataccaaaggacttattctatgaaatactttaaaaattcctcatcagcaaaggacaattcaataaatacatccaaacatgatcatcgttggagccggaggtggcaggagtcgaggcgctgatccctaaaatggcgaacatgtgttttcatcatttcagccaaagtcctaacttcctgtgcctttcctatcacctcgagaagtaattatcagttggtttggatttttggaccaccgttcagtcattttgggttgccgtgctcccaaaacattttaaatgaaagtattggcattcaaaaagacagcagacaaaatgaaagaaaatgagagcagaaagtaagcatttccagcctatctaatttctttagttttctatttgcctccagtgcagtccatttcctaatgtataccagcctactgtactatttaaaatgctcaatttcagcaccgatggccatgtaaataagatgatttaatgttgattttaatcctgtatataaaataaaaagtcacaatgagtttgggcatatttaatgatgattatggagccttagaggtctttaatcattggttcggctgcttttatgtagtttaggctggaaatggtttcacttgctctttgactgtcagcaagactgaagatggcttttcctggacagctagaaaacacaaaatcttgtaggtcattgcacctatctcagccataggtgcagtttgcttctacatgatgctaaaggctgcgaatgggatcctgatggaactaaggactccaatgtcgaactcttctttgctgcattcctttttcttcacttacaagaaaggcctgaatggaggacttttctgtaaccagg

SEQ ID NO: 25 - DNA, 389 bp, Homo sapiens
ctccaaaggagccagcgtctccccagttcctgaaatcctgggtgttgcctgccagtcgccatgagaacttcctaccttctgctgtttactctctgcttacttttgtctgagatggcctcaggtggtaactttctcacaggccttggccacagatctgatcattacaattgcgtcagcagtggagggcaatgtctctattctgcctgcccgatctttaccaaaattcaaggcacctgttacagagggaaggccaagtgctgcaagtgagctgggagtgaccagaagaaatgacgcagaagtgaaatgaactttttataagcattcttttaataaaggaaaattgcttttgaagtataaaaaaaaaaaaaaaaaaaaaaaaaaaaaaaaaa

SEQ ID NO: 26 - DNA, 3450 bp, Homo sapiens
ggcgcggagcggtgcggcggcgggaggcggaggcgagggtgcgatggcgcggagcccgggacgcgcgtacgccctgctgcttctcctgatctgctttaacgttggaagtggacttcacttacaggtcttaagcacaagaaatgaaaataagctgcttcctaaacatcctcatttagtgcggcaaaagcgcgcctggatcaccgcccccgtggctcttcgggagggagaggatctgtccaagaagaatccaattgccaagatacattctgatcttgcagaagaaagaggactcaaaattacttacaaatacactggaaaagggattacagagccaccttttggtatatttgtctttaacaaagatactggagaactgaatgttaccagcattcttgatcgagaagaaacaccattttttctgctaacaggttacgctttggatgcaagaggaaacaatgtagagaaacccttagagctacgcattaaggttcttgatatcaatgacaacgaaccagtgttcacacaggatgtctttgttgggtctgttgaagagttgagtgcagcacatactcttgtgatgaaaatcaatgcaacagatgcagatgagcccaataccctgaattcgaaaatttcctatagaatcgtatctctggagcctgcttatcctccagtgttctacctaaataaagatacaggagagatttatacaaccagtgttaccttggacagagaggaacacagcagctacactttgacagtagaagcaagagatggcaatggagaagttacagacaaacctgtaaaacaagctcaagttcagattcgtattttggatgtcaatgacaatatacctgtagtagaaaataaagtgcttgaagggatggttgaagaaaatcaagtcaacgtagaagttacgcgcataaaagtgttcgatgcagatgaaataggttctgataattggctggcaaattttacatttgcatcaggaaatgaaggaggttatttccacatagaaacagatgctcaaactaacgaaggaattgtgacccttattaaggaagtagattatgaagaaatgaagaatcttgacttcagtgttattgtcgctaataaagcagcttttcacaagtcgattaggagtaaatacaagcctacacccattcccatcaaggtcaaagtgaaaaatgtgaaagaaggcattcattttaaaagcagcgtcatctcaatttatgttagcgagagcatggatagatcaagcaaaggccaaataattggaaattttcaagcttttgatgaggacactggactaccagcccatgcaagatatgtaaaattagaagatagagataattggatctctgtggattctgtcacatctgaaattaaacttgcaaaacttcctgattttgaatctagatatgttcaaaatggcacatacactgtaaagattgtggccatatcagaagattatcctagaaaaaccatcactggcacagtccttatcaatgttgaagacatcaacgacaactgtcccacactgatagagcctgtgcagacaatctgtcacgatgcagagtatgtgaatgttactgcagaggacctggatggacacccaaacagtggccctttcagtttctccgtcattgacaaaccacctggcatggcagaaaaatggaaaatagcacgccaagaaagtaccagtgtgctgctgcaacaaagtgagaaaaagcttgggagaagtgaaattcagttcctgatttcagacaatcagggttttagttgtcctgaaaagcaggtccttacactcacagtttgtgagtgtctgcatggcagcggctgcagggaagcacagcatgactcctatgtgggcctgggacccgcagcaattgcgctcatgattttggcctttctgctcctgctattggtaccacttttactgctgatgtgccattgcggaaagggcgccaaaggctttacccccatacctggcaccatagagatgctgcatccttggaataatgaaggagcaccacctgaagacaaggtggtgccatcatttctgccagtggatcaagggggcagtctagtaggaagaaatggagtaggaggtatggccaaggaagccacgatgaaaggaagtagctctgcttccattgtcaaagggcaacatgagatgtccgagatggatggaaggtgggaagaacacagaagcctgctttctggtagagctacccagtttacaggggccacaggcgctatcatgaccactgaaaccacgaagaccgcaagggccacaggggcttccagagacatggccggagctcaggcagctgctgttgcactgaacgaagaattcttaagaaattatttcactgataaagcggcctcttacactgaggaagatgaaaatcacacagccaaagattgccttctggtttattctcaggaagaaactgaatcgctgaatgcttctattggttgttgcagttttattgaaggagagctagatgaccgcttcttagatgatttgggacttaaattcaagacactagctgaagtttgcctgggtcaaaaaatagatataaataaggaaattgagcagagacaaaaacctgccacagaaacaagtatgaacacagcttcacattcactctgtgagcaaactatggttaattcagagaatacctactcctctggcagtagcttcccagttccaaaatctttgcaagaagccaatgcagagaaagtaactcaggaaatagtcactgaaagatctgtgtcttctaggcaggcgcaaaaggtagctacacctcttcctgacccaatggcttctagaaatgtgatagcaacagaaacttcctatgtcacagggtccactatgccaccaaccactgtgatcctgggtcctagccagccacagagccttattgtgacagagagggtgtatgctccagcttctaccttggtagatcagccttatgctaatgaaggtacagttgtggtcactgaaagagtaatacagcctcatgggggtggatcgaatcctctggaaggcactcagcatcttcaagatgtaccttacgtcatggtgagggaaagagagagcttccttgcccccagctcaggtgtgcagcctactctggccatgcctaatatagcagtaggacagaatgtgacagtgacagaaagagttctagcacctgcttccactctgcaatccagttaccagattcccactgaaaattctatgacggctaggaacaccacggtgtctggagctggagtccctggccctctgccagattttggtttagaggaatctggtcattctaattctaccataaccacatcttccaccagagttaccaagcatagcactgtacagcattcttactcctaaacagcagtcagccacaaactgacccagagtttaattagcagtgactaatt

SEQ ID NO: 27 - DNA, 2398 bp, Homo sapiens
ccgcagaggagcctcggccaggctagccagggcgcccccagcccctccccaggccgcgagcgcccctgccgcggtgcctggcctcccctcccagactgcagggacagcacccggtaactgcgagtggagcggaggacccgagcggctgaggagagaggaggcggcggcttagctgctacggggtccggccggcgccctcccgaggggggctcaggaggaggaaggaggacccgtgcgagaatgcctctgccctggagccttgcgctcccgctgctgctctcctgggtggcaggtggtttcgggaacgcggccagtgcaaggcatcacgggttgttagcatcggcacgtcagcctggggtctgtcactatggaactaaactggcctgctgctacggctggagaagaaacagcaagggagtctgtgaagctacatgcgaacctggatgtaagtttggtgagtgcgtgggaccaaacaaatgcagatgctttccaggatacaccgggaaaacctgcagtcaagatgtgaatgagtgtggaatgaaaccccggccatgccaacacagatgtgtgaatacacacggaagctacaagtgcttttgcctcagtggccacatgctcatgccagatgctacgtgtgtgaactctaggacatgtgccatgataaactgtcagtacagctgtgaagacacagaagaagggccacagtgcctgtgtccatcctcaggactccgcctggccccaaatggaagagactgtctagatattgatgaatgtgcctctggtaaagtcatctgtccctacaatcgaagatgtgtgaacacatttggaagctactactgcaaatgtcacattggtttcgaactgcaatatatcagtggacgatatgactgtatagatataaatgaatgtactatggatagccatacgtgcagccaccatgccaattgcttcaatacccaagggtccttcaagtgtaaatgcaagcagggatataaaggcaatggacttcggtgttctgctatccctgaaaattctgtgaaggaagtcctcagagcacctggtaccatcaaagacagaatcaagaagttgcttgctcacaaaaacagcatgaaaaagaaggcaaaaattaaaaatgttaccccagaacccaccaggactcctacccctaaggtgaacttgcagcccttcaactatgaagagatagtttccagaggcgggaactctcatggaggtaaaaaagggaatgaagagaaaatgaaagaggggcttgaggatgagaaaagagaagagaaagccctgaagaatgacatagaggagcgaagcctgcgaggagatgtgtttttccctaaggtgaatgaagcaggtgaattcggcctgattctggtccaaaggaaagcgctaacttccaaactggaacataaagatttaaatatctcggttgactgcagcttcaatcatgggatctgtgactggaaacaggatagagaagatgattttgactggaatcctgctgatcgagataatgctattggcttctatatggcagttccggccttggcaggtcacaagaaagacattggccgattgaaacttctcctacctgacctgcaaccccaaagcaacttctgtttgctctttgattaccggctggccggagacaaagtcgggaaacttcgagtgtttgtgaaaaacagtaacaatgccctggcatgggagaagaccacgagtgaggatgaaaagtggaagacagggaaaattcagttgtatcaaggaactgatgctaccaaaagcatcatttttgaagcagaacgtggcaagggcaaaaccggcgaaatcgcagtggatggcgtcttgcttgtttcaggcttatgtccagatagccttttatctgtggatgactgaatgttactatctttatatttgactttgtatgtcagttccctggtttttttgatattgcatcataggacctctggcattttagaattactagctgaaaaattgtaatgtaccaacagaaatattattgtaagatgcctttcttgtataagatatgccaatatttgctttaaatatcatatcactgtatcttctcagtcatttctgaatctttccacattatattataaaatatggaaatgtcagtttatctcccctcctcagtatatctgatttgtataagtaagttgatgagcttctctctacaacatttctagaaaatagaaaaaaaagcacagagaaatgtttaactgtttgactcttatgatacttcttggaaactatgacatcaaagatagacttttgcctaagtggcttagctgggtctttcatagccaaacttgtatatttaaattctttgtaataataatatccaaatcatcaaaaaaaaaaaaaaaaa

SEQ ID NO: 28 - DNA, 5532 bp, Homo sapiens
ggcccaccgccgcccaggcaaggccgccctgccttgggcgcagcgctgccatggctgggggccgtggggcccccgggcgcggccgggacgagcctccggagagctacccgcaacgacaggaccacgagctacaggccctggaggccatctacggcgcggacttccaagacctgcggccggacgcttgcggaccggtcaaagagccccctgaaatcaatttagttttgtaccctcaaggcctaactggtgaagaagtatatgtaaaagtggatttgagggttaaatgcccacctacctatccagatgtagttcctgaaatagagttaaaaaatgccaaaggtctatcaaatgaaagtgtcaatttgttaaaatctcgcctagaagaactggccaagaaacactgtggggaggtgatgatctttgaactggcttaccacgtgcagtcatttctcagcgagcataacaagccccctcccaagtcttttcatgaagaaatgctggaaaggcgggctcaggaggagcagcagaggctgttggaggccaagcggaaagaagagcaggagcaacgtgaaatcctgcatgagattcagagaaggaaagaagagataaaagaagagaaaaaaaggaaagaaatggctaagcaggaacgtttggaaattgctagtttgtcaaaccaagatcatacctctaagaaggacccaggaggacacagaacggctgccattctacatggaggctctcctgactttgtaggaaatggtaaacatcgggcaaactcctcaggaaggtctaggcgagaacgtcagtattctgtatgtaatagtgaagattctcctggctcttgtgaaattctgtatttcaatatggggagtcctgatcagctcatggtgcacaaagggaaatgtattggcagtgatgaacaacttggaaaattagtctacaatgctttggaaacagccactggtggctttgtcttgttgtatgagtgggtccttcagtggcagaaaaaaatgggtccattccttaccagtcaagaaaaagagaagattgataagtgcaaaaagcagattcaaggaacagaaacagaattcaactcactggtaaaattgagccatccaaatgtagtacgctaccttgcaatgaatctcaaagagcaagacgactccatcgtggtggacattttagtggagcacattagtggggtctctcttgctgcacacctgagccactcaggccccatccctgtgcatcagcttcgcaggtacacagctcagctcctgtcaggccttgattatctgcacagcaattctgtggtgcataaggtcctgagtgcatctaatgtcttggtggatgcagaaggcaccgtcaagattacggactatagcatttctaagcgcctcgcagacatttgcaaggaggatgtgtttgagcaaacccgagttcgttttagtgacaatgctctgccttataaaacggggaagaaaggagatgtttggcgtcttggccttctgctgctgtccctcagccaaggacaggaatgtggagagtaccctgtgaccatccctagtgacttaccagctgactttcaagattttctaaagaaatgtgtgtgcttggatgacaaggaaagatggagtccccagcagttgttgaaacacagctttataaatccccagccaaaaatgcctctagtggaacaaagtcctgaagattctgaaggacaagattatgttgagactgttattcctagcaaccggctacccagtgctgccttctttagtgagacacagagacagttttcccgatacttcattgagtttgaagaattacaacttcttggtaaaggagcttttggagctgtcatcaaggtgcagaacaagttggacggctgctgctacgcagtgaagcgcatccccatcaacccggccagccggcagttccgcaggatcaagggcgaagtgacactgctgtcacggctgcaccatgagaacattgtgcgctactacaacgcctggatcgagcggcacgagcggccggcgggaccggggacgccgcccccggactccgggcccctggccaaggatgaccgagctgcacgcgggcagccggcgagcgacacagacggcctggacagcgtagaggccgccgcgccgccacccatcctcagcagctcggtggagtggagcacttcgggcgagcgctcggccagtgcccgtttccccgccaccggcccgggctccagcgatgacgaggacgacgacgaggacgagcacggtggcgtcttctcccagtccttcctgcctgcttcagattctgaaagtgatattatctttgacaatgaagatgagaacagtaaaagtcagaatcaggatgaagattgcaatgaaaagaatggctgccatgaaagtgagccatcagtgacgactgaggctgtgcactacctatacatccagatggagtactgtgagaagagcactttacgagacaccattgaccagggactgtatcgagacaccgtcagactctggaggctttttcgagagattctggatggattagcttatatccatgagaaaggaatgattcaccgggatttgaagcctgtcaacatttttttggattctgatgaccatgtgaaaataggtgattttggtttggcgacagaccatctagccttttctgctgacagcaaacaagacgatcagacaggagacttgattaagtcagacccttcaggtcacttaactgggatggttggcactgctctctatgtaagcccagaggtccaaggaagcaccaaatctgcatacaaccagaaagtggatctcttcagcctgggaattatcttctttgagatgtcctatcaccccatggtcacggcttcagaaaggatctttgttctcaaccaactcagagatcccacttcgcctaagtttccagaagactttgacgatggagagcatgcaaagcagaaatcagtcatctcctggctgttgaaccacgatccagcaaaacggcccacagccacagaactgctcaagagtgagctgctgcccccaccccagatggaggagtcagagctgcatgaagtgctgcaccacacgctgaccaacgtggatgggaaggcctaccgcaccatgatggcccagatcttctcgcagcgcatctcccctgccatcgattacacctatgacagcgacatactgaagggcaacttctcaatccgtacagccaagatgcagcagcatgtgtgtgaaaccatcatccgcatctttaaaagacatggagctgttcagttgtgtactccactactgcttccccgaaacagacaaatatatgagcacaacgaagctgccctattcatggaccacagcgggatgctggtgatgcttccttttgacctgcggatcccttttgcaagatatgtggcaagaaataatatattgaatttaaaacgatactgcatagaacgtgtgttcaggccgcgcaagttagatcgatttcatcccaaagaacttctggagtgtgcatttgatattgtcacttctaccaccaacagctttctgcccactgctgaaattatctacactatctatgaaatcatccaagagtttccagcacttcaggaaagaaattacagtatttatttgaaccataccatgttattgaaagcaatactcttacactgtgggatcccagaagataaactcagtcaagtctacattattctgtatgatgctgtgacagagaagctgacgaggagagaagtggaagctaaattttgtaatctgtctttgtcttctaatagtctgtgtcgactctacaagtttattgaacagaagggagatttgcaagatcttatgccaacaataaattcattaataaaacagaaaacaggtattgcacagttggtgaagtatggcttaaaagacctagaggaggttgttggactgttgaagaaactcggcatcaagttacaggtcttgatcaatttgggcttggtttacaaggtgcagcagcacaatggaatcatcttccagtttgtggctttcatcaaacgaaggcaaagggctgtacctgaaatcctcgcagctggaggcagatatgacctgctgattccccagtttagagggccacaagctctggggccagttcccactgccattggggtcagcatagctatagacaagatatctgctgctgtcctcaacatggaggaatctgttacaataagctcttgtgacctcctggttgtaagtgttggccagatgtctatgtccagggccatcaacctaacccagaaactctggacagcaggcatcacagcagaaatcatgtacgactggtcacagtcccaagaggaattacaagagtactgcagacatcatgaaatcacctatgtggcccttgtctcggataaagaaggaagccatgtcaaggttaagtctttcgagaaggaaaggcagacagagaagcgtgtgctggagactgaacttgtggaccatgtactgcagaaactgaggactaaagtcactgatgaaaggaatggcagagaagcttccgataatcttgcagtgcaaaatctgaaggggtcattttctaatgcttcaggtttgtttgaaatccatggagcaacagtggttcccattgtgagtgtgctagccccggagaagctgtcagccagcactaggaggcgctatgaaactcaggtacaaactcgacttcagacctcccttgccaacttacatcagaaaagcagtgaaattgaaattctggctgtggatctacccaaagaaacaatattacagtttttatcattagagtgggatgctgatgaacaggcatttaacacaactgtgaagcagctgctgtcacgcctgccaaagcaaagatacctcaaattagtctgtgatgaaatttataacatcaaagtagaaaaaaaggtgtctgtgctatttctgtacagctatagagatgactactacagaatcttattttaaccctaaagaactgtcgttaacctcattcaaacagacagaggcttatactggaataatggaatgttgtacattcatcataatttaaaattaaattctaagaagaggctgggtgcagtggctcacacctttaatcccagcactttgggaagccaaggcaggaagactgcttgaaaccaggagtttgagaccagcctgagcaacaaagcaagaccccatctctataaaaactaaaaaaattagttgggcatggtggcacatgcctgtagtcccagctactccagaggctgagatggatcatctgagcctcaggaggttgaggctgcagtgagctgtgactgcgccactgcactccagtctgggacaacagagcaagaccctgtcttaaaaaaaaaaagaaaaaaaaaatttttttctaagaagctgtcctacaaagttgagctttgttagtttttcatgtgtaatatattataaatttatcttttgggatataataaatgctttcatatacctgcaaaaaaaaaaaaaaaaaaaa

SEQ ID NO: 29 - DNA, 709 bp, Homo sapiens
atttacaataaatgaagattaccctcaaatgctagaagctgtctaggtccgtccggtgtgtcagattttcctcagattagatgtgccaataaccaagtttattcagtaaacaacttgtacttgtttcatctggttttattactctcacccataaacaggaatgactctttgaccctctggaaatatgtaatgcttccaatcttgctttgtgtatctcatttaatttgttataaggtagtactgattttagcatattaatgcgatttcttccttgttgtttgctttggtctgtgttcaatccagagagcttaaattgtcattattttgggaagaaaacctgtatttttgttagtttacaatattatgaaatttcacttcaggagaaactgctgggcttcctgtggctttgttttcttagttactttttccgtgccgtgtattttttaattgatttttcttcttttacttgaaaagaaagtgttttattttcaaatctggtccatatttacattctagttcagagccaagccttaaactgtacagaatttccactgtaattaaaactatttagtgttagttataaatagccttcaaaaagagagattctccattcacgatcacctgcatcacagcccatggtgaatgtatgtttctgcatagcgaaataaaaatggcaaatgcaaaaaaaaaaaaaaaaaaaaaaaaaaaa

SEQ ID NO: 30 - DNA, 1634 bp, Homo sapiens
gctgcttcccaccagcaaagaccacgactggagagccgagccggaggcagctgggaaacatgaagagcgtcttgctgctgaccacgctcctcgtgcctgcacacctggtggccgcctggagcaataattatgcggtggactgccctcaacactgtgacagcagtgagtgcaaaagcagcccgcgctgcgagaggacagtgctcgacgactgtggctgctgccgagtgtgcgctgcagggcggggagaaacttgctaccgcacagtctcaggcatggatggcatgaagtgtggcccggggctgaggtgtcagccttctaatggggaggatccttttggtgaagagtttggtatctgcaaagactgtccctacggcaccttcgggatggattgcagagagacctgcaactgccagtcaggcatctgtgacagggggacgggaaaatgcctgaaattccccttcttccaatattcagtaaccaagtcttccaacagatttgtttctctcacggagcatgacatggcatctggagatggcaatattgtgagagaagaagttgtgaaagagaatgctgccgggtctcccgtaatgaggaaatggttaaatccacgctgatcccggctgtgatttctgagagaaggctctattttcgtgattgttcaacacacagccaacattttaggaactttctagattatagcataaggacatgtaatttttgaagaccaaatgtgatgcatggtggatccagaaaacaaaaagtaggatacttacaatccataacatccatatgactgaacacttgtatgtgtttgttaaatattcgaatgcatgtagatttgttaaatgtgtgtgtatagtaacactgaagaactaaaaatgcaatttaggtaatcttacatggagacaggtcaaccaaagagggagctaggcaaagctgaagaccgcagtgagtcaaattagttctttgactttgatgtacattaatgttgggatatggaatgaagacttaagagcaggagaagatggggagggggtgggagtgggaaataaaatatttagcccttccttggtaggtagcttctctagaatttaattgtgctttttttttttggctttgggaaaagtcaaaataaaacaaccagaaaacccctgaaggaagtaagatgtttgaagcttatggaaatttgagtaacaaacagctttgaactgagagcaatttcaaaaggctgctgatgtagttcccgggttacctgtatctgaaggacggttctggggcataggaaacacatacacttccataaatagctttaacgtatgccacctcagagataaatctaagaagtattttacccactggtggtttgtgtgtgtatgaaggtaaatatttatatatttttataaataaatgtgttagtgcaagtcatcttccctacccatatttatcatcctcttgaggaaagaaatctagtattatttgttgaaaatggttagaataaaactatgactctataaggttttcaaacatctgaggcatgataaatttattatccataattatagtaataataaccttaataagcataagaaaaacagagtcactctggatttcaaaaatgtcaaaaaaaaaaaaaa

SEQ ID NO: 31 - DNA, 1530 bp, Homo sapiens
agcactcccggagcctgcaacgcttgagatcctctccgcgcccgccaccccgcagggtgccccgcgccgttcccgccgccccgccgcccccgtcgcgggcccctgcaccccgagcatccgccccgggtggcacgtccccgagcccaccaggccggccccgtctccccatccgtctagtccgctcgcggtgccatgccattcctcgggcaggactggcggtcccccgggcagaactgggtgaagacggccgacggctggaagcgcttcctggatgagaagagcggcagtttcgtgagcgacctcagcagttactgcaacaaggaggtatacaataaggagaatcttttcaacagcctgaactatgatgttgcagccaagaagagaaagaaggacatgctgaatagcaaaaccaaaactcagtatttccaccaagaaaaatggatctatgttcacaaaggaagtactaaagagcgccatggatattgcaccctgggggaagctttcaacagactggacttctcaactgccattctggattccagaagatttaactacgtggtccggctgttggagctgatagcaaagtcacagctcacatccctgagtggcatcgcccaaaagaacttcatgaatattttggaaaaagtggtactgaaagtccttgaagaccagcaaaacattagactaataagggaactactccagaccctctacacatccttatgtacactggtccaaagagtcggcaagtctgtgctggtcgggaacattaacatgtgggtgtatcggatggagacgattctccactggcagcagcagctgaacaacattcagatcaccaggcctgccttcaaaggcctcaccttcactgacctgcctttgtgcctacaactgaacatcatgcagaggctgagcgacgggcgggacctggtcagcctgggccaggctgcccccgacctgcacgtgctcagcgaagaccggctgctgtggaagaaactctgccagtaccacttctccgagcggcagatccgcaaacgattaattctgtcagacaaagggcagctggattggaagaagatgtatttcaaacttgtccgatgttacccaaggaaagagcagtatggagatacccttcagctctgcaaacactgtcacatcctttcctggaagggcactgaccatccgtgcactgccaataacccagagagctgctccgtttcactttcaccccaggactttatcaacttgttcaagttctgaatcccagcacatgacaacacttcagaagggtccccctgctgactggagagctgggaatatggcatttggacacttcatttgtaaatagtgtacattttaaacattggctcgaaacttcagagataagtcatggagaggacattggaggggagaaatgcagttgctgactgggaatttaagaatgtgaacttctcactagaattggtatggaaaagcaaaatactgtaaataaactttttttctaacaatttgccaaaaaaaaaaaaaaaa

SEQ ID NO: 32 - DNA, 2367 bp, Homo sapiens
gcggccgcgatggggccgaagcgcccgaagccccggagcccacaaactgccgggcccgcctcgccgccgggacccgggtgcctgggctcggcttgaagcggcggcggcgcaccggcacagccgcgggagcatgggcaggaggatgcggggcgccgccgccaccgcggggctctggctgctggcgctgggctcgctgctggcgctgtggggagggctcctgccgccgcggaccgagctgcccgcctcccggccgcccgaagaccgactcccacggcgcccggcccggagcggcggccccgcgcccgcgcctcgcttccctctgcccccgcccctggcgtgggacgcccgcggcggctccctgaaaactttccgggcgctgctcaccctggcggccggcgcggacggcccgccccggcagtcccggagcgagcccaggtggcacgtgtcagccaggcagccccggccggaggagagcgccgcggtgcacgggggcgtcttctggagccgcggcctggaggagcaggtgcccccgggcttttcggaggcccaggcggcggcgtggctggaggcggctcgcggcgcccggatggtggccctggagcgcgggggttgcgggcgcagctccaaccgactggcccgttttgccgacggcacccgcgcctgcgtgcgctacggcatcaacccggagcagattcagggcgaggccctgtcttactatctggcgcgcctgctgggcctccagcgccacgtgccgccgctggcactggctcgggtggaggctcggggcgcgcagtgggcgcaggtgcaggaggagctgcgcgctgcgcactggaccgagggcagcgtggtgagcctgacacgctggctgcccaacctcacggacgtggtggtgcccgcgccctggcgctcggaggacggccgtctgcgccccctccgggatgccgggggtgagctggccaacctcagccaggcggagctggtggacctagtacaatggaccgacttaatccttttcgactacctgacggccaacttcgaccggctcgtaagcaacctcttcagcctgcagtgggacccgcgcgtcatgcagcgtgccaccagcaacctgcaccgcggtccgggcggggcgctggtctttctggacaatgaggcgggcttggtgcacggctaccgggtagcaggcatgtgggacaagtataacgagccgctgttgcagtcagtgtgcgtgttccgcgagcggaccgcgcggcgcgtcctggagctgcaccgcggacaggacgccgcggcccggctgctgcgcctctaccggcgccacgagcctcgcttccccgagctggccgcccttgcagacccccacgctcagctgctacagcgccgcctcgacttcctcgccaagcacattttgcactgtaaggccaagtacggccgccggtctgggacttagtgtcaccgggaggaaaagagagagatctggggctggggtatggatgatggggggaagggcggtcgcctctgccactgtcagggaccagccggccaacgcccacccgcaaaggtgtctaaaaacttcagcttttcacccacctgcccctttctttcaatcccacgctgtttcctttcaaagttctgggaggacgaactcaccgaggcgagaagtgtaacattctctccacccagcttataaaaggattctttactgtgccagcacggggattggatccgaagaaactggctactggggtttggcccccgagtggccgtccctgtgggagatgcaccccattcttgggcccccctcattccctttccgaaaaaggaaaacttgcgtttgagccgttgagctaattctgcaattttctaccaaacagagcgctggtggccccggagcagggctgtgacattggctggtggagccccttcctgtgttctccctttgttccagcgccgcgatggtgagatcactgttccaagcagggggacggctcgcgataggacaaagagagcaggacctccagactctggggagccctgcagaccttgacaatttgcctgactcattcctgacctcttgtcattttggcctgaaggctacaaattcagggtcagctgtatgcactaagtcaaataatgaatttcttcctccctctcgcaaccgaccaaaattttgacaacgatgatgttcaccagaaggaaaaaaaaatcagttttatgcactttattttgttttgattttcattttttattaagaaaaaattttattttacagaatttaccttctctgtatatatgtgcataaagtgtggtgtaaatatactaaacaaacttatatttcaataaaagggagtttaaaatttaaaaaaaaaaaaa

SEQ ID NO: 33 - DNA, 2472 bp, Homo sapiens
ctggaccccaggtctggagcgaattccagcctgcagggctgataagcgaggcattagtgagattgagagagactttaccccgccgtggtggttggagggcgcgcagtagagcagcagcacaggcgcgggtcccgggaggccggctctgctcgcgccgagatgtggaatctccttcacgaaaccgactcggctgtggccaccgcgcgccgcccgcgctggctgtgcgctggggcgctggtgctggcgggtggcttctttctcctcggcttcctcttcgggtggtttataaaatcctccaatgaagctactaacattactccaaagcataatatgaaagcatttttggatgaattgaaagctgagaacatcaagaagttcttatataattttacacagataccacatttagcaggaacagaacaaaactttcagcttgcaaagcaaattcaatcccagtggaaagaatttggcctggattctgttgagctagcacattatgatgtcctgttgtcctacccaaataagactcatcccaactacatctcaataattaatgaagatggaaatgagattttcaacacatcattatttgaaccacctcctccaggatatgaaaatgtttcggatattgtaccacctttcagtgctttctctcctcaaggaatgccagagggcgatctagtgtatgttaactatgcacgaactgaagacttctttaaattggaacgggacatgaaaatcaattgctctgggaaaattgtaattgccagatatgggaaagttttcagaggaaataaggttaaaaatgcccagctggcaggggccaaaggagtcattctctactccgaccctgctgactactttgctcctggggtgaagtcctatccagatggttggaatcttcctggaggtggtgtccagcgtggaaatatcctaaatctgaatggtgcaggagaccctctcacaccaggttacccagcaaatgaatatgcttataggcgtggaattgcagaggctgttggtcttccaagtattcctgttcatccaattggatactatgatgcacagaagctcctagaaaaaatgggtggctcagcaccaccagatagcagctggagaggaagtctcaaagtgccctacaatgttggacctggctttactggaaacttttctacacaaaaagtcaagatgcacatccactctaccaatgaagtgacaagaatttacaatgtgataggtactctcagaggagcagtggaaccagacagatatgtcattctgggaggtcaccgggactcatgggtgtttggtggtattgaccctcagagtggagcagctgttgttcatgaaattgtgaggagctttggaacactgaaaaaggaagggtggagacctagaagaacaattttgtttgcaagctgggatgcagaagaatttggtcttcttggttctactgagtgggcagaggagaattcaagactccttcaagagcgtggcgtggcttatattaatgctgactcatctatagaaggaaactacactctgagagttgattgtacaccgctgatgtacagcttggtacacaacctaacaaaagagctgaaaagccctgatgaaggctttgaaggcaaatctctttatgaaagttggactaaaaaaagtccttccccagagttcagtggcatgcccaggataagcaaattgggatctggaaatgattttgaggtgttcttccaacgacttggaattgcttcaggcagagcacggtatactaaaaattgggaaacaaacaaattcagcggctatccactgtatcacagtgtctatgaaacatatgagttggtggaaaagttttatgatccaatgtttaaatatcacctcactgtggcccaggttcgaggagggatggtgtttgagctagccaattccatagtgctcccttttgattgtcgagattatgctgtagttttaagaaagtatgctgacaaaatctacagtatttctatgaaacatccacaggaaatgaagacatacagtgtatcatttgattcacttttttctgcagtaaagaattttacagaaattgcttccaagttcagtgagagactccaggactttgacaaaagcaagcatgtcatctatgctccaagcagccacaacaagtatgcaggggagtcattcccaggaatttatgatgctctgtttgatattgaaagcaaagtggacccttccaaggcctggggagaagtgaagagacagatttatgttgcagccttcacagtgcaggcagctgcagagactttgagtgaagtagcctaagaggattctttagagaatccgtattgaatttgtgtggtatgtcactcagaaagaatcgtaatgggtatattgataaattttaaaattggtatatttgaaataaagttgaatattatatataaaaaaaaaaaaaaaaaaaaaaaaaaaaaaaaa

SEQ ID NO: 34 - DNA, 1010 bp, Homo sapiens
gtctggccccgccttttctctgctctcctgaacctttaggcttgtctcggcccatttgaagaccaggaagttgatcaatcccgaggctgctgagagacggtggcgcgattgggacagtcgccagggatggctgagcgtgaagatgcagcgggtgtccgggctgctctcctggacgctgagcagagtcctgtggctctccggcctctctgagccgggagctgcccggcagccccggatcatggaagagaaagcgctagaggtttatgatttgattagaactatccgggacccagaaaagcccaatactttagaagaactggaagtggtctcggaaagttgtgtggaagttcaggagataaatgaagaagaatatctggttattatcaggttcacgccaacagtacctcattgctctttggcgactcttattgggctgtgcttaagagtaaaacttcagcgatgtttaccatttaaacataagttggaaatctacatttctgaaggaacccactcaacagaagaagacatcaataagcagataaatgacaaagagcgagtggcagctgcaatggaaaaccccaacttacgggaaattgtggaacagtgtgtccttgaacctgactgatagctgttttaagagccactggcctgtaattgtttgatatatttgtttaaactctttgtataatgtcagagactcatgtttaatacataggtgatttgtacctcagagcattttttaaaggattctttccaagcgagatttaattataaggtagtacctaatttgttcaatgtataacattctcaggatttgtaacacttaaatgatcagacagaataatattttctagttattatgtgtaagatgagttgctatttttctgatgctcattctgatacaactatttttcgtgtcaaatatctactgtgcccaaatgtactcaatttaaatcattactctgtaaaataaataagcagatgattcttataaaaaaaaaaaaaaaaaa

SEQ ID NO: 35 - DNA, 2960 bp, Homo sapiens
accaggtgctccataatgagtcaaaagggagccccacctcggcttaccctgagcggaaggggagccccacgcctgggttttccactcgaagaggaagtccaactacaggatttatcgagcagaaggggagccccacctcagcctaccccgagcgcaggggtagtccggtgccccccgtgccggagcgcaggagcagtccggtgccccccgtgccggagcgcaggggcagcctcacccttaccatctccggggagtccccgaaggccgggcccgcggaggaggggccgagcggccccatggaagtcttgcgcaaaggctccttgcgtcttaggcagctgctgagccccaagggcgagcggcgcatggaggatgagggtggcttcccagtgccgcaggagaacggccaacccgagagcccgcggcgtctgtcactgggccagggtgacagcacggaggctgccacagaagagcggggtccgcgggcgcgcctgtcctcagccacggccaacgccttgtacagcagcaaccttcgggatgacacgaaggccattctggagcagatcagtgcccacggccagaagcaccgtgcggtccctgccccgagccccggcccgacccacaacagccccgagctaggccgtccaccggctgctggcgtcctggccccagatatgtccgacaaggacaagtgttcagccatcttccgctcggacagcttggggacccagggccggctgagccgcacgctgccagccagcgcggaggagcgcgatcggctgctgcgccgcatggagagcatgcgcaaggagaagcgcgtgtacagccgcttcgaggtcttctgcaagaaagaggaggccagcagccctggggcaggggaaggccccgcggaggagggcaccagggacagcaaggtgggcaagttcgtgcccaagatcctgggcacgttcaaaagcaagaagtgagtcttctggcctggcaacccaggccagggtgcccgcatcgctgccccggtcatccagaagccccgcggaacagagagccctgctcatgtgcttgagcagcggctgtcaggccacggccgcttggggcttggctgagtgcgccagacctcggctccactggaggctcacctggcagctgccgtctctgccccctggcctccccaacgctggggctgcacccctcgccaccagtgcctttctcccctcagcaccttcatctctgcaccgtcagccttgcgtggcgcagcgtctggctccgccatctctttgtgcctcagtcccccccgccccctttatttttttgagatctagggctggagtgcagttgagcggtctgggctcactgcaacctctgcctcccgggttccagcgattctcctgcctcagcctcctgagtagctgggattacagatgtatgctaccacgcccaggtagtttttgtatttttagtagagacagggtttcactatgttggccaggctggtctccaactcctggcctcaaatgatcagcccgcttcagcctcccaaagtggggggattacaggcgtgagccttgcaccccgctaagtcccctatcctcttgcaagggtctcacctctgtgcctcaattcctcattctctgggcccttctcctcctcagggcctcctgttctcagggcctcccccctccccgctccctccctctctcaaggtctcctccttccctccccccccccccgtctcccccctcccccgcctgggcttcacttcctttcctacttggattctcctgctcgctgcctcccagcatcttttttggaggcccgtctcttgctgtggggaagactgggctggctgcgggcagtttgcaaggggtgggtggggcgggggggggagctggaccagaagatgccccttggagtggcaaggaagctggacagggcaggcctctggggacgggacacagggaagcccgaaggggcgccttggccaggtctgccatctcctccagcgaggctctggccagcactgggtgagagtggggagggggcactggcctttgcagcacagtaaaacatggtccagacaacctgtggccccggcctcatgagcaccccctgcacaggcccagcccaagccaggcgctagaagggctggttgtggagtgcttatccttgacaggtatggggccaggtgagggcaggggacaaggtgcagctgaggccgagcccaactaggtcctgggcacccctgcaggtgggagtggtccttgtcctcctggtatccagcagacacccccctctccccaccagccccattctcaggtcctttcctctttgtcaccaacaccaagaatctgtccagggttcttggcttatcttttatctcttttcactcctagagaggaattgcaattgactcagaatgacacattttggcaccacgtgtgtagaaagcccccactgttagatgatagcctcgtgaaattcatgtttctgtattctcctatttcttttcaaaaactaattttttttttagtgtaataaatcctaagagggaactgatttaagaaacaaggccgccaaacaaaggcagcagttccgactccagcagctgggaaaggaaggaaagtgaccccactttcactcctgcacagcccactggttaccaaaaccaccgtgcaagtcgggatgacagcagggacttctggccaggtgggaaaggtgcctggaagcgggatgcgcctgtgcgtctcttggccatgatgttcttgtgggcatgttattcttggtgctgcctggggtgttgctgagcggacaggctctccagctggagtccatggagaggccagaggctggcggccctgcctgggccttcggagcctcctgcctgcaccctccacctcttctaaaccatgatgtggcacattttggtgttaataaaacacaacacacaaagtaaaaaaaaaaaaaaaaaa

SEQ ID NO: 36 - DNA, 2813 bp, Homo sapiens
ctgactttctctcggtgcgtccagtggagctctgagtttcgaatcggtggcggcggattccccgcgcgcccggcgtcggggcttccaggaggatgcggagccccagcgcggcgtggctgctgggggccgccatcctgctagcagcctctctctcctgcagtggcaccatccaaggaaccaatagatcctctaaaggaagaagccttattggtaaggttgatggcacatcccacgtcactggaaaaggagttacagttgaaacagtcttttctgtggatgagttttctgcatctgtcctcactggaaaactgaccactgtcttccttccaattgtctacacaattgtgtttgtggtgggtttgccaagtaacggcatggccctgtgggtctttcttttccgaactaagaagaagcaccctgctgtgatttacatggccaatctggccttggctgacctcctctctgtcatctggttccccttgaagattgcctatcacatacatggcaacaactggatttatggggaagctctttgtaatgtgcttattggctttttctatggcaacatgtactgttccattctcttcatgacctgcctcagtgtgcagaggtattgggtcatcgtgaaccccatggggcactccaggaagaaggcaaacattgccattggcatctccctggcaatatggctgctgattctgctggtcaccatccctttgtatgtcgtgaagcagaccatcttcattcctgccctgaacatcacgacctgtcatgatgttttgcctgagcagctcttggtgggagacatgttcaattacttcctctctctggccattggggtctttctgttcccagccttcctcacagcctctgcctatgtgctgatgatcagaatgctgcgatcttctgccatggatgaaaactcagagaagaaaaggaagagggccatcaaactcattgtcactgtcctggccatgtacctgatctgcttcactcctagtaaccttctgcttgtggtgcattattttctgattaagagccagggccagagccatgtctatgccctgtacattgtagccctctgcctctctacccttaacagctgcatcgacccctttgtctattactttgtttcacatgatttcagggatcatgcaaagaacgctctcctttgccgaagtgtccgcactgtaaagcagatgcaagtatccctcacctcaaagaaacactccaggaaatccagctcttactcttcaagttcaaccactgttaagacctcctattgagttttccaggtcctcagatgggaattgcacagtaggatgtggaacctgtttaatgttatgaggacgtgtctgttatttcctaatcaaaaaggtctcaccacataccatgtggatgcagcacctctcaggattgctaggagctcccctgtttgcatgagaaaagtagtcccccaaattaacatcagtgtctgtttcagaatctctctactcagatgaccccagaaactgaaccaacagaagcagacttttcagaagatggtgaagacagaaacccagtaacttgcaaaaagtagacttggtgtgaagactcacttctcagctgaaattatatatatacacatatatatatatattttacatctgggatcatgatagacttgttagggcttcaaggccctcagagatgatcagtccaactgaacgaccttacaaatgaggaaaccaagataaatgagctgccagaatcaggtttccaatcaacagcagtgagatgggattggacagtagaatttcaatgtccagtgagtgaggttcttgtaccacttcatcaaaatcatggatcttggctgggtgcggtgcctcatgcctgtaatcctagcactttgggaggctgaggcaggcaatcacttgaggtcaggagttcgagaccagcctggccatcatggcgaaacctcatctctactaaaaatacaaaagttaaccaggtgtgtggtgcacgtttgtaatcccagttactcaggaggctgaggcacaagaattgagtatcactttaactcaggaggcagaggttgcagtgagccgagattgcaccactgcactccagcttgggtgataaaataaaataaaatagtcgtgaatcttgttcaaaatgcagattcctcagattcaataatgagagctcagactgggaacagggcccaggaatctgtgtggtacaaacctgcatggtgtttatgcacacagagatttgagaaccattgttctgaatgctgcttccatttgacaaagtgccgtgataatttttgaaaagagaagcaaacaatggtgtctcttttatgttcagcttataatgaaatctgtttgttgacttattaggactttgaattatttctttattaaccctctgagtttttgtatgtattattattaaagaaaaatgcaatcaggattttaaacatgtaaatacaaattttgtataacttttgatgacttcagtgaaattttcaggtagtctgagtaatagattgttttgccacttagaatagcatttgccacttagtattttaaaaaataattgttggagtatttattgtcagttttgttcacttgttatctaatacaaaattataaagccttcagagggtttggaccacatctctttggaaaatagtttgcaacatatttaagagatacttgatgccaaaatgactttatacaacgattgtatttgtgacttttaaaaataattattttattgtgtaattgatttataaataacaaaattttttttacaacttaaaaaaaaaa

SEQ ID NO: 37 - DNA, 2811 bp, Homo sapiens
acacgtccaacgccagcatgcagcgcccgggcccccgcctgtggctggtcctgcaggtgatgggctcgtgcgccgccatcagctccatggacatggagcgcccgggcgacggcaaatgccagcccatcgagatcccgatgtgcaaggacatcggctacaacatgactcgtatgcccaacctgatgggccacgagaaccagcgcgaggcagccatccagttgcacgagttcgcgccgctggtggagtacggctgccacggccacctccgcttcttcctgtgctcgctgtacgcgccgatgtgcaccgagcaggtctctacccccatccccgcctgccgggtcatgtgcgagcaggcccggctcaagtgctccccgattatggagcagttcaacttcaagtggcccgactccctggactgccggaaactccccaacaagaacgaccccaactacctgtgcatggaggcgcccaacaacggctcggacgagcccacccggggctcgggcctgttcccgccgctgttccggccgcagcggccccacagcgcgcaggagcacccgctgaaggacgggggccccgggcgcggcggctgcgacaacccgggcaagttccaccacgtggagaagagcgcgtcgtgcgcgccgctctgcacgcccggcgtggacgtgtactggagccgcgaggacaagcgcttcgcagtggtctggctggccatctgggcggtgctgtgcttcttctccagcgccttcaccgtgctcaccttcctcatcgacccggcccgcttccgctaccccgagcgccccatcatcttcctctccatgtgctactgcgtctactccgtgggctacctcatccgcctcttcgccggcgccgagagcatcgcctgcgaccgggacagcggccagctctatgtcatccaggagggactggagagcaccggctgcacgctggtcttcctggtcctctactacttcggcatggccagctcgctgtggtgggtggtcctcacgctcacctggttcctggccgccggcaagaagtggggccacgaggccatcgaagccaacagcagctacttccacctggcagcctgggccatcccggcggtgaagaccatcctgatcctggtcatgcgcagggtggcgggggacgagctcaccggggtctgctacgtgggcagcatggacgtcaacgcgctcaccggcttcgtgctcattcccctggcctgctacctggtcatcggcacgtccttcatcctctcgggcttcgtggccctgttccacatccggagggtgatgaagacgggcggcgagaacacggacaagctggagaagctcatggtgcgtatcgggctcttctctgtgctgtacaccgtgccggccacctgtgtgatcgcctgctacttttacgaacgcctcaacatggattactggaagatcctggcggcgcagcacaagtgcaaaatgaacaaccagactaaaacgctggactgcctgatggccgcctccatccccgccgtggagatcttcatggtgaagatctttatgctgctggtggtggggatcaccagcgggatgtggatttggacctccaagactctgcagtcctggcagcaggtgtgcagccgtaggttaaagaagaagagccggagaaaaccggccagcgtgatcaccagcggtgggatttacaaaaaagcccagcatccccagaaaactcaccacgggaaatatgagatccctgcccagtcgcccacctgcgtgtgaacagggctggagggaagggcacaggggcgcccggagctaagatgtggtgcttttcttggttgtgtttttctttcttcttcttcttttttttttttttataaaagcaaaagagaaatacataaaaaagtgtttaccctgaaattcaggatgctgtgatacactgaaaggaaaaatgtacttaaagggttttgttttgttttggttttccagcgaagggaagctcctccagtgaagtagcctcttgtgtaactaatttgtggtaaagtagttgattcagccctcagaagaaaacttttgtttagagccctccgtaaatatacatctgtgtatttgagttggctttgctacccatttacaaataagaggacagataactgctttgcaaattcaagagcctcccctgggttaacaaatgagccatccccagggcccacccccaggaaggccacagtgctgggcggcatccctgcagaggaaagacaggacccggggcccgcctcacaccccagtggatttggagttgcttaaaatagactctggccttcaccaatagtctctctgcaagacagaaacctccatcaaacctcacatttgtgaactcaaacgatgtgcaatacatttttttctctttccttgaaaataaaaagagaaacaagtattttgctatatataaagacaacaaaagaaatctcctaacaaaagaactaagaggcccagccctcagaaacccttcagtgctacattttgtggctttttaatggaaaccaagccaatgttatagacgtttggactgatttgtggaaaggaggggggaagagggagaaggatcattcaaaagttacccaaagggcttattgactctttctattgttaaacaaatgatttccacaaacagatcaggaagcactaggttggcagagacactttgtctagtgtattctcttcacagtgccaggaaagagtggtttctgcgtgtgtatatttgtaatatatgatatttttcatgctccactattttattaaaaataaaatatgttctttaaaaaaa

SEQ ID NO: 38 - DNA, 1473 bp, Homo sapiens
ggagtccaaaagaaaaggaagaggaggaaaaacaagtgtgtgttggggggaacagggggaaaagcatttttggtggatggtatgaagccagccatggaaactgcagccgaggaaaatactgaacaaagccaagagagaaaaggctgctttgaatgctgcatcaagtgtctgggaggagtcccctacgcctccctggtggccaccatcctctgcttctccggggtggccttattctgcggctgtgggcatgtggctctcgcaggcaccgtggcgattcttgagcaacacttctccaccaacgccagtgaccatgccttgctgagcgaggtgatacaactgatgcagtatgtcatctatggaattgcgtcctttttcttcttgtatgggatcattctgttggcagaaggcttttacaccacaagtgcagtgaaagaactgcacggtgagtttaaaacaaccgcttgtggccgatgcatcagtggaatgttcgttttcctcacctatgtgcttggagtggcctggctgggtgtgtttggtttctcagcggtgcccgtgtttatgttctacaacatatggtcaacttgtgaagtcatcaagtcaccgcagaccaacgggaccacgggtgtggagcagatctgtgtggatatccgacaatacggtatcattccttggaatgctttccccggaaaaatatgtggctctgccctggagaacatctgcaacacaaacgagttctacatgtcctatcacctgttcattgtggcctgtgcaggagctggtgccaccgtcattgccctgctgatctacatgatggctactacatataactatgcggttttgaagtttaagagtcgggaagattgctgcactaaattctaaattgcataaggagttttagagagctatgctctgtagcatgaaatatcactgacactccagactaaagcagagtctaggtttctgcaattttgttacagtaatttgtaaatagctttagtaaactcaccttgcatggtagattaataagatgacttactgtacatgaattacacaataatgagatctggtggctatttccacattttgaaaaggattcagttatttactgacagtggtgagcatcctttttaaaataatgttctcatacttaaacattagagagcagtatctttaaatgaattattaacactttggaatacttacattttctgttatttttgattgcctgataaccagtttcaatgatgaaaatgaaaacaagtgctgaagatgaaatggaagagaaccgttttaatctggattttgttttgtcacacctggaaaatactttgcaaatatgttctaaattgaaaacaattttttttatgatcacatggttcactaccaaatgaccctcaaataagccagatgaaaatttgaagaaaaaggtcacccagttctctggaaaaaaaaaaaaaaaaaaaaaaaaaaaaa

SEQ ID NO: 39 - DNA, 2428 bp, Homo sapiens
agtgttaccttggagcctacaatgagaggtatttcaaaatgagtgaagcatgactctcacagatgaaggcctagacgcaggatctttaatgaaaaaacacttgggccacttcaagacgacaaacgctcactgggcaaaacaccttcactgaaaagagacctcatattatgcaaaaaaaatcttaaaaggcctctgccttcagaagttacaagatgatcaattcaacctccacacagcctccagatgaatcctgctctcagaacctcctgatcactcagcagatcattcctgtgctgtactgtatggtcttcattgcaggaatcctactcaatggagtgtcaggatggatattcttttacgtgcccagctctgagagtttcatcatctatctcaagaacattgttattgctgactttgtgatgagcctgacttttcctttcaagatccttggtgactcaggccttggtccctggcagctgaacgtgtttgtgtgcagggtctctgccgtgctcttctacgtcaacatgtacgtcagcattgtgttctttgggctcatcagctttgacagatattataaaattgtaaagcctctttggacttctttcatccagtcagtgagttacagcaaacttctgtcagtgatagtatggatgctcatgctcctccttgctgttccaaatattattctcaccaaccagagtgttagggaggttacacaaataaaatgtatagaactgaaaagtgaactgggacggaagtggcacaaagcatcaaactacatcttcgtggccatcttctggattgtgtttcttttgttaatcgttttctatactgctatcacaaagaaaatctttaagtcccaccttaagtcaagtcggaattccacttcggtcaaaaagaaatctagccgcaacatattcagcatcgtgtttgtgttttttgtctgttttgtaccttaccatattgccagaatcccctacacaaagagtcagaccgaagctcattacagctgccagtcaaaagaaatcttgcggtatatgaaagaattcactctgctactatctgctgcaaatgtatgcttggaccctattatttatttctttctatgccagccgtttagggaaatcttatgtaagaaattgcacattccattaaaagctcagaatgacctagacatttccagaatcaaaagaggaaatacaacacttgaaagcacagatactttgtgagttcctaccctcttccaaagaaagaccacgtgtgcatgttgtcatcttcaattacataacagaaatcaataagatatgtgccctcatcataaatatcatctctagcactgccatccaatttagttcaataaaattcaaatataagtttccatgcttttttgtaacatcaaagaaaacatacccatcagtaatttctctaatactgacctttctattctctattaataaaaaattaatacatacaattattcaattctattatattaaaataagttaaagtttataaccactagtctggtcagttaatgtagaaatttaaatagtaaataaaacacaacataatcaaagacaactcactcaggcatcttctttctctaaataccagaatctagtatgtaattgttttcaacactgtccttaaagactaacttgaaagcaggcacagtttgatgaagggctagagagctgtttgcaataaaaagtcaggtttttttcctgatttgaagaagcaggaaaagctgacacccagacaatcacttaagaaaccccttattgatgtatttcatggcactgcaaaggaagaggaatattaattgtatacttagcaagaaaattttttttttctgatagcactttgaggatattagatacatgctaaatatgttttctacaaagacttacgtcatttaatgagcctggggttctggtgttagaatatttttaagtaggctttactgagagaaactaaatattggcatacgttatcagcaacttcccctgttcaatagtatgggaaaaataagatgactgggaaaaagacacacccacaccgtagaacatatattaatctactggcgaatgggaaaggagaccattttcttagaaagcaaataaacttgatttttttaaatctaaaatttacattaatgagtgcaaaataacacataaaatgaaaattcacacatcacatttttctggaaaacagacggattttacttctggagacatggcatacggttactgacttatgagctaccaaaactaaattctttctctgctattaactggctagaagacattcatctatttttcaaatgttctttcaaaacatttttataagtaatgtttgtatctatttcatgctttactgtctatatactaataaagaaatgttttaataccgaaaaaaaaaaaaaaaa

SEQ ID NO: 40 - DNA, 837 bp, Homo sapiens
cgtaaaaccgacactaaaacgtccctgcctacaaatcatccggccaaattatgagttcattgtattatgcgaatgctttattttctaaatatccagcctcaagttcggttttcgctaccggagccttcccagaacaaacttcttgtgcgtttgcttccaacccccagcgcccgggctatggagcgggttcgggcgcttccttcgccgcctcgatgcagggcttgtaccccggcggggggggcatggcgggccagagcgcggccggcgtctacgcggccggctatgggctcgagccgagttccttcaacatgcactgcgcgccctttgagcagaacctctccggggtgtgtcccggcgactccgccaaggcggcgggcgccaaggagcagagggactcggacttggcggccgagagtaacttccggatctacccctggatgcgaagctcaggaactgaccgcaaacgaggccgccagacctacacccgctaccagaccctggagctggagaaagaatttcactacaatcgctacctgacgcggcggcggcgcatcgagatcgcgcacacgctctgcctcacggaaagacagatcaagatttggtttcagaaccggcgcatgaagtggaaaaaggagaacaagaccgcgggcccggggaccaccggccaagacagggctgaagcagaggaggaagaggaagagtgagggatggagaaagggcagaggaagagacatgagaaagggagaggaagagaagcccagctctgggaactgaatcaggaaactcaaatcgaatagggaagtaaaaaaacaaaacaaaaaacaaaaaaaaaaaaaa

SEQ ID NO: 41 - DNA, 3512 bp, Homo sapiens
gacatggcgagtgtagtgctgccgagcggatcccagtgtgcggcggcagcggcggcggcggcgcctcccgggctccggctccggcttctgctgttgctcttctccgccgcggcactgatccccacaggtgatgggcagaatctgtttacgaaagacgtgacagtgatcgagggagaggttgcgaccatcagttgccaagtcaataagagtgacgactctgtgattcagctactgaatcccaacaggcagaccatttatttcagggacttcaggcctttgaaggacagcaggtttcagttgctgaatttttctagcagtgaactcaaagtatcattgacaaacgtctcaatttctgatgaaggaagatacttttgccagctctataccgatcccccacaggaaagttacaccaccatcacagtcctggtcccaccacgtaatctgatgatcgatatccagagagacactgcggtggaaggtgaggagattgaagtcaactgcactgctatggccagcaagccagccacgactatcaggtggttcaaagggaacacagagctaaaaggcaaatcggaggtggaagagtggtcagacatgtacactgtgaccagtcagctgatgctgaaggtgcacaaggaggacgatggggtcccagtgatctgccaggtggagcaccctgcggtcactggaaacctgcagacccagcggtatctagaagtacagtataagccacaagtgcacattcagatgacttatcctctacaaggcttaacccgggaaggggacgcgcttgagttaacatgtgaagccatcgggaagccccagcctgtgatggtaacttgggtgagagtcgatgatgaaatgcctcaacacgccgtactgtctgggcccaacctgttcatcaataacctaaacaaaacagataatggtacataccgctgtgaagcttcaaacatagtggggaaagctcactcggattatatgctgtatgtatacgatccccccacaactatccctcctcccacaacaaccaccaccaccaccaccaccaccaccaccaccatccttaccatcatcacagattcccgagcaggtgaagaaggctcgatcagggcagtggatcatgccgtgatcggtggcgtcgtggcggtggtggtgttcgccatgctgtgcttgctcatcattctggggcgctattttgccagacataaaggtacatacttcactcatgaagccaaaggagccgatgacgcagcagacgcagacacagctataatcaatgcagaaggaggacagaacaactccgaagaaaagaaagagtacttcatctagatcagcctttttgtttcaatgaggtgtccaactggccctatttagatgataaagagacagtgatattggaacttgcgagaaattcgtgtgtttttttatgaatgggtggaaaggtgtgagactgggaaggcttgggatttgctgtgtaaaaaaaaaaaaaaatgttctttggaaagtacactctgctgtttgacacctcttttttcgtttgtttgtttgtttaatttttatttcttcctaccaagtcaaacttggatacttggatttagtttcagtagattgcagaaaattctgtgccttgttttttgtttgtttgttgcgttcctttcttttccccctttgtgcacatttatttcctccctctaccccaatttcggattttttccaaaatctcccattttggaatttgcctgctgggattccttagactcttttccttcccttttctgttctagttttttacttttgtttatttttatggtaactgctttctgttccaaattcagtttcataaaaggagaaccagcacagcttaggatttcatagttcagaatttagtgtatccataatgcattcttctctgttgtcgtaaagatttgggtgaacaaacaatgaaaactctttgctgctgcccatgtttcaaatacttagagcagtgaagactagaaaattagactgtgattcagaaaatgttctgtttgctgtggaactacattactgtacagggttatctgcaagtgaggtgtgtcacaatgagattgaatttcactgtctttaattctgtatctgtagacggctcagtatagataccctacgctgtccagaaaggtttggggcagaaaggactcctcctttttccatgccctaaacagacctgacaggtgaggtctgttccttttatataagtggacaaattttgagttgccacaggaggggaagtagggaggggggaaatacagttctgctctggttgtttctgttccaaatgattccatccacctttcccaatcggccttacttctcactaatttgtaggaaaaagcaagttcgtctgttgtgcgaatgactgaatgggacagagttgattttttttttttttttcctttgtgcttagttaggaaggcagtaggatgtggcctgcatgtactgtatattacagatatttgtcatgctgggatttccaactcgaatctgtgtgaaactttcattccttcagatttggcttgacaaaggcaggaggtacaaaagaagggctggtattgttctcacactggtctgctgtcgctctcagttctcgataggtcagagcagaggtggaaaaacagcatgtacggattttcagttacttaatcaaaactcaaatgtgagtgtttttatctttttacctttcatacactagccttggcctctttcctcagccttaagaaccatctgccaaaaattactgatcctcgcatgatggcagccatagtgcatagctactaaaatcagtgaccttgaacatatcttagatggggagcctcgggaaaaggtagaggagtcacgttaccatttacatgttttaaagaaagaagtgtggggattttcactgaaacgtctaggaaatctagaagtagtcctgaaggacagaaactaaactcttaccatatgtttggtaagactccagactccagctaacagtccctatggaaagatggcatcaaaaaagatagatctatatatatatataaatatatattctattacattttcagtgagtaattttggattttgcaaggtgcatttttactattgttacattatgtggaaaacttatgctgatttatttaagggggaaaaagtgtcaactctttgttatttgaaaacatgtttatttttcttgtctttattttaacctttgatagaaccattgcaatatgggggccttttgggaacggactggtatgtaaaagaaaatccattatcgagcagcattttatttacccctcccctatccctaggcacttaaccaagacaaaaagccacaatgaacatccctttttcaatgaattttataatctgcagctctattccgagcccttagcacccattccgaccatagtataatcatatcaaagggtgagaatcatttagcatgttgttgaaaggttttttttcagttgttctttttagaaaaaaag

SEQ ID NO: 42 - DNA, 4205 bp, Homo sapiens
gaagcgggctgggaggcgtcggcggcggcagcgcacgtggtgacgtgcgagggggtgcggcgcgagcggtcggcggcggcggaggcagtgtctcccggtcgcgcgtggaggtcggtcgctcagagctgctgggcgcagtttctccgcctgctgcttcggcgcggctgtatcggcgagcgagcgagttcccgcgagttctcggtggcgctcccccttcctttcagtctccacggactggcccctcgtccttctacttgaccgctcccgtcttccgccgccttctggcgctttccgttgggccgattcccgcccgcttcctcctgcttcccatcgaagctctagaaatgaatgtttccatctcttcagagatgaaccagattatgatgcatcattatcacagaagaaattcgtgtctatagcttttaaggacttgattacatcattttcaagcctgatagttttggaatcaccattagagcttaagacacacctgccttcatttcaaccacctgtcttcataccctgacgaagtgcaccttttaacactcctttgtccttggattacttaagagttcccagaaatacatttgccaccaacagagtagccaaatttataaggaaaaatgattcccaatggatatttgatgtttgaggatgaaaattttattgagtcttctgttgccaaattaaatgccctgaggaaaagtggccagttctgtgatgttcgacttcaggtctgtggccatgaaatgttagcacacagagcagtgctagcttgctgcagtccctatttatttgaaatctttaatagtgatagtgatcctcatggaatttctcacgttaaatttgatgatctcaatccagaagctgttgaagtcttgttgaattatgcctacactgctcagttgaaagcagataaggaattggtaaaagatgtttattctgcagcaaaaaagctgaagatggatcgagtaaagcaggtttgtggtgattatttactgtctagaatggatgttaccagctgcatctcttaccgaaattttgcaagttgtatgggagactcccgtttgttgaataaggttgatgcttatattcaggagcatttgttacaaatttctgaagaggaggagtttcttaagcttccaaggctaaagttggaggtaatgcttgaagataatgtttgcttgcccagcaatggcaaattatatacaaaggtaatcaactgggtgcagcgtagcatctgggagaatggagacagtctggaagagctgatggaagaggttcaaaccttgtactactcagctgatcacaagctgcttgatgggaacctactagatggacaggctgaggtgtttggcagtgatgatgaccacattcagtttgtgcagaaaaagccaccacgtgagaatggccataagcagataagtagcagttcaactggatgtctctcttctccaaatgctacagtacaaagccctaagcatgagtggaaaatcgttgcttcagaaaagacttcaaataacacttacttgtgcctggctgtgctggatggtatattctgtgtcatttttcttcatgggagaaacagcccacagagctcaccaacaagtactccaaaactaagtaagagtttaagctttgagatgcaacaagatgagctaatcgaaaagcccatgtctcctatgcagtacgcacgatctggtctgggaacagcagagatgaatggcaaactcatagctgcaggtggctataacagagaggaatgtcttcgaacagtcgaatgctataatccacatacagatcactggtcctttcttgctcccatgagaacaccaagagcccgatttcaaatggctgtactcatgggccagctctatgtggtaggtggatcaaatggccactcagatgacctgagttgtggagagatgtatgattcaaacatagatgactggattcctgttccagaattgagaactaaccgttgtaatgcaggagtgtgtgctctgaatggaaagttatacatcgttggtggctctgatccatatggtcaaaaaggactgaaaaattgtgatgtatttgatcctgtaacaaagttgtggacaagctgtgcccctcttaacattcggagacaccagtctgcagtctgtgagcttggtggttatttgtacataatcggaggtgcagaatcttggaattgtctgaacacagtagaacgatacaatcctgaaaataatacctggactttaattgcacccatgaatgtggctaggcgaggagctggagtggctgttcttaatggaaaactgtttgtatgtggtggctttgatggttctcatgccatcagttgtgtggaaatgtatgatccaactagaaatgaatggaagatgatgggaaatatgacttcaccaaggagcaatgctgggattgcaactgtagggaacaccatttatgcagtgggaggattcgatggcaatgaatttctgaatacggtggaagtctataaccttgagtcaaatgaatggagcccctatacaaagattttccagttttaacaaatttaagaccctctcaaactaacaggcttagtgatgtaattatggttagtagaggtacacttgtgaataaagagggtgggtgggtatagatgttgctaacagcaacacaaagcttttgcatattgcatactattaaacatgctgtacatactttttgggtttatttggaaaggaatgcaaagatgaaggtctgttttgtgtacttttaagactttggttattttactttttggaaaagaataaaccaagaattgattgggcacatcatttcaagaagtcccctctcctccacatttgttttgccaatttgcacattaaatgactcttccctcaaatgtgtactatggggtaaaaggggtagggtttaaagatgtagacagttgggttttttaagggccctttttcaataactggaacactctataacaaaggatacttatttaaatagatgacattgactatttttgtttttattaaaaggaagcttacatgcctaccaatatttaatcttttatgattgcctttttataactttttatattctcagcagagtgctttaccaattgaagtaaaatgtggcaggctggagttattgaagcagagtggcagtcttcagtttgcagagtaggggtctgtcttttaaactctgagtgcaaacttcagagttcttgccttggctgcagtttttttccttcaagaatgcagtactaacatttatttgagtggagttactgaacagtaacatagctgtgatttttggtatttgaaacactggttttaaatattttgacttgttgagggtatgttttatatagcaagacattatatagcagtaaaaaatggtgttttatcttctatataattcctgtttttattattaacaaaacagtcctaaatagcagccctcaattgtgaaaaaatttactttaaactacattaggttgtgaatgcaggttttatcagaactatgtttttgttcagtttatctgttcatatggataaatattggttgggatgacttggtgtctaatgtgtagtgctacacacctaacttatggggccaaaatagcatgtcctaatgcttgctgctgatttaaacacattaaaggtactttgcaggaaatccttgcaccatgggattaatatccaattgctgcttgtacactcattcattactaaaagttttgagaaatttttttttccagtaatgagcttaagaaatttgtggaaaataactcacctggcatcttacatctgaaataaggaatgatataaggtttttttttctcacagaagatgaagcacacaggaacctaatgggccaactgggatgaggtgactattctgagatgactattcagtggctaacttgggttaggaagaaaataattaggtattttctccaaatgttcactggtactctgccactttatttctctcatctgttacacaaagaaccaccaggaaagcaaatcagtttggttggtaactctgtaattcctaactatcactggtttggttctggactaaaactacattgacagattgaatttgcctaatatgatgactgtttttaatatggatctgtatgtgttctattcagcacaaggaaataaaattttagttgaggattcagcactaaaaaaaaaa

SEQ ID NO: 43 - DNA, 3796 bp, Homo sapiens
gcatactgctagtggcgcgcggaggagcgacgcgtggagaagcggcccacgtgtctgcccagagtcaagtcctgtgttcttcccgctccttacgcatccgcggtccagggcgccctttcagccccgctggtgttcgcccaccccgggccgcgtgagtggggccccacgcagctccccgcactccgtgggccaacttggccaagcaactctgtccggggagcggtgcttgcggggggtgagtaccgggcactgcgcatgcggagctccaaattcaaacagctgttttcagaggctggagggcgggcggactggtagcagctggggctaggagaggctttctctaggaggcggccgctcgggagccatggtggaccggggccctctgctcacctcggccatcatcttctacctggccatcggggcggcgatcttcgaagtgctggaggagccacactggaaggaggccaagaaaaactactacacacagaagctgcatctgctcaaggagttcccgtgcctgggtcaggagggcctggacaagatcctagaggtggtatctgatgctgcaggacagggtgtggccatcacagggaaccagaccttcaacaactggaactggcccaatgcaatgatttttgcagcgaccgtcattaccaccattggatatggcaatgtggctcccaagacccccgccggtcgcctcttctgtgttttctatggtctcttcggggtgccgctctgcctgacgtggatcagtgccctgggcaagttcttcgggggacgtgccaagagactagggcagttccttaccaagagaggtgtgagtctgcggaaggcgcagatcacgtgcacagtcatcttcatcgtgtggggcgtcctagtccacctggtgatcccacccttcgtattcatggtgactgaggggtggaactacatcgagggcctctactactccttcatcaccatctccaccatcggcttcggtgactttgtggccggtgtgaaccccagcgccaactaccacgccctgtaccgctacttcgtggagctctggatctacttggggctggcctggctgtccctttttgtcaactggaaggtgagcatgtttgtggaagtccacaaagccattaagaagcggcggcggcgacggaaggagtcctttgagagctccccacactcccggaaggccctgcaggtgaaggggagcacagcctccaaggacgtcaacatcttcagctttctttccaagaaggaagagacctacaacgacctcatcaagcagatcgggaagaaggccatgaagacaagcgggggtggggagacgggcccgggcccagggctggggcctcaaggcggtgggctcccagcactgcccccttccctggtgcccctggtagtctactccaagaaccgggtgcccaccttggaagaggtgtcacagacactgaggagcaaaggccacgtatcaaggtccccagatgaggaggctgtggcacgggcccctgaagacagctcccctgcccccgaggtgttcatgaaccagctggaccgcatcagcgaggaatgcgagccatgggacgcccaggactaccacccactcatcttccaggacgccagcatcaccttcgtgaacacggaggctggcctctcagacgaggagacctccaagtcctcgctagaggacaacttggcaggggaggagagcccccagcagggggctgaagccaaggcgcccctgaacatgggcgagttcccctcctcctccgagtccaccttcaccagcactgagtctgagctctctgtgccttacgaacagctgatgaatgagtacaacaaggctaacagccccaagggcacatgaggcagggccggctccccaccccacctttgatggcctcttcccccctcaccctagggtgtcccgagatgaccgggacgcctggcccctggtgggggggcagcctcggaactgggagtggggggccaggggccttcctaaccttccatcatcctcagctagatgtatgcccgggacagggcctctgttctccagctgaaccataccctggctgtgggggcatctgtcctgagcttggctggtgtatctcacaatgcaaagacatgctggctggcgggacaggtgggcaggactgaccctgaggaggccttgcctgcagggtctttgtctcaccatttggtggagtatcacacggttctctgaggtctggggcctcagctgtttaagtttaccggtattactgagctcggcatttggagagggagctctgaagtgtctggggaggtaccgctgtgcgtggggtcaggtgtttccgtaccacagcaggagcagggcccgcccgcatcccagctgtgggcctgccggtcaggtcgggcacctactacaaaccgtagtggggtggaggctgctggaggtgggagtgaggagatgagggcagggtctcaaacagtcctgactcacagggcctggaaacaagtcctatgtgggcctggggcctggggtcctcatcctccttgttggtctactcaggcccagcccagagctgtgttccctgtctcaggtcaagcagtggcagacgcaaggctttctgtgggcccccaagtggtaggagggagagtagcagagcatgggttactggaagccgggactgctagggctggtggccagggagctgcaagagtgaggctcagctctggctggttctgcccttacccctcctgcccgcctgagaactgcacaccctgcccgctggccccaggacctgcactcccaatcctgctgtcttctccttccctgtgccctgaacaaggacctcactgcccgccttcccctcccaccagcccccttgggccaggcagggtgaggccaaattgctcttggcccacaaatgggtgatggtcagatatgtgaatcaagctcctttctctagctagtgtttgatgtgcacgtgtgtgtgcacagtgcgtgtgtgcacacgcacacctgtgcactcgtgtgtgtttaagaaaggaaaggatttgggctggggagcaaaagataatgtgaaactgttggtggactctctggtgaggggtgggcagaacttgctgctactagagttcttgggttctccatgatgttcaccctggggctggcccactgtgtcctgaatgtttttgttattttttgttttattttttaaacaaactgctgtttttatatacctggaatctgttgttggcttcagagccagtggttaaagagcagggtcccaaggattgggagatctagtgtctgccctcctgccctgcaactcaattgggcctttttcggtgacctcatccaaggccatgatgtcaagggccatgtccccaagcagaggtggagaaggggacactgaggtgagcaaaagcaggaaggggcatccactgcgggtgactggaggccgggcaggaagcaagtcatcagagccgctcagctccgttcactctctgccttctgccccactactgtggggcagtggggccagagcccacctccccaacatgtgaagacagtgatgggcacgtgcccacacccccacttctctagccgtttgcagaggccgccacccagcaggggcctgaaaaggagctgcctcgtatttttctgtgaaatgttttaatgaaccatgttgttgctggttgtcctggcatcgcgcacactgtatgtacatactggcaacgatgtcaaatgtaatttattttaacatttttacaataaaacatgaggtggacaggcaaaaaaaaaaaaaaa

SEQ ID NO: 44 - DNA, 5492 bp, Homo sapiens
tgagggctttgctatgacctcagtcccctcacggagccacgactgccccttgctgccacagcctttccaagaccctgcccggccctgccccatcctcagccccgagtcaccatgggcagcgtcagtagcctcatctccggccacagcttccacagcaagcactgccgggcttcgcagtacaagctgcgcaagtcctcccacctcaagaagctcaaccggtattccgacgggctgctgaggtttggcttctcccaggactccggtcacggcaagtccagctccaaaatgggcaagagcgaagacttcttctacatcaaggtcagccagaaagcccggggctcccatcacccagattacacggcactgtccagcggggatttagggggccaggctggggtggactttgacccgtccacaccccccaagctcatgcccttctccaatcagctagaaatgggctccgagaagggtgcagtgaggcccacagccttcaagcctgtgctgccacggtcaggagccatcctgcactcctccccggagagtgccagccaccagctgcaccccgcccctccagacaagcccaaggagcaggagctgaagcctggcctgtgctctggggcgctgtcagactccggccggaactccatgtccagcctgcccacacacagcaccagcagcagctaccagctggacccgctggtcacacccgtgggacccacaagccgttttgggggctccgcccacaacatcacccagggcatcgtcctccaggacagcaacatgatgagcctgaaggctctgtccttctccgacggaggtagcaagctgggccactcgaacaaggcagacaagggcccctcgtgtgtccgctcccccatctccacggacgagtgcagcatccaggagctggagcagaagctgttggagagggagggcgccctccagaagctgcagcgcagctttgaggagaaggagcttgcctccagcctggcctacgaggagcggccgcggcgctgcagggacgagctggagggcccggagcccaaaggcggcaacaagctcaagcaggcctcgcagaagagccagcgcgcgcagcaggtcctgcacctgcaggtactgcagcttcagcaggagaagcggcagctccggcaggagctcgagagcctcatgaaggagcaggacctgctggagaccaagctcaggtcctacgagagggagaagaccagcttcggccccgcgctggaggagacccagtgggaggtgtgccagaagtcaggcgagatctccctcctgaagcagcagctgaaggagtcccagacggaggtgaacgccaaggctagcgagatcctgggtctcaaggcacagctgaaggacacgcggggcaagctggagggcctggagctgaggacccaggacctggagggcgccctgcgcaccaagggcctggagctggaggtctgtgagaatgagctgcagcgcaagaagaacgaggcggagctgctgcgggagaaggtgaacctgctggagcaggagctgcaggagctgcgggcccaggccgccctggcccgcgacatggggccgcccaccttccccgaggacgtccctgccctgcagcgggagctggagcggctgcgggccgagctgcgggaggagcggcaaggccatgaccagatgtcctcgggcttccagcatgagcggctcgtgtggaaggaggagaaggagaaggtgattcagtaccagaaacagctgcagcagagctacgtggccatgtaccagcggaaccagcgcctggagaaggccctgcagcagctggcacgtggggacagcgccggggagcccttggaggttgacctggaaggggctgacatcccctacgaggacatcatagccactgagatctgaggggctgcctgggaaggcgagtctggggacctggcactgggaggcagggctctcccgtgcatcccccctgctcagcaattcagacccctctgagagacgccactccctgggacacagacccaggacccccgaggggagggcaggatggcctttccttccctctctgatgtcccagtgctcaccagccctgcagcccaccagacgtcaggccctgactcctctggctttcccaggagatgggtccaggggtctgtctgctttggttaagggctccctaaactttggcctttgttcgaaatagatatcctctccccctcctccagggaaggtggccacagcaagaacagcggctcccctccgcttctcatcccaacctctttttcctcctggacacattggaatgccttggaaatagaaagaagccatatatgaccagaagccttggaaccagccccatcagaacctgagctattttcctctggccgcagaggtgtaggggtggaatgagccgcggggaagctggctttgaaacctcagggctgtcccagccccggcaagccacaggaaggaggggagagacaggcagcccagcagtgtggagaccctgccacagccagaggagggcagagggagaatccaagggttgagagccagtggcgggtgatggccagcccctggggcccagcccctgtttactggttcttgcaaatgggagctgagcagcctctggacagccagtgacctttgacctcggtgaccactcttctttaagccatagaccctgaggccctgggctgggtgctgggaagggagggttgaaaccaccgtgaaccagagggtgtggctttccaggcaccctcagggagcctccccatctgtccagctggggccagaggctgggagtccctacctgcttcacgttggccggcggctactctggaatgtttttccctccccagaatcaagcttttgcttgatccagaagagcccatatcactaagatggcatatatgtgatctgggcattttcctcctctgcctacagccaggtttagcggcaaacctttcccccttagcaccttcagggctgagttctgggtttctagaggtcaggacggctcctcagagcgccaggaagccagagccccaagcaggacgaaaaagaggcatacacacagcagtgtgaatagcctggccaccagccatcctccctccacctcaagacccccatttgtcccagactaaaggatccagagagcagctccctttctcaggagcttgggcagtgccccagggagtccagggtttctctgcagatgtgcggagcgggaggcggtggtagagagagataaaaggtggagtttctctgttgtttggttcagggattttatttttaattttatgagacagggtcttgctctgtcccccaggctggagtgcagtggcatgatcatagctcactgcagcctcatactcctgggctcaagcaatcctcctgcctcagccttccaactagctgggactacaggtgcgcgccaccgtgcctggctaacttttcattttttttgtagggacggggtctcgttttgttgccaaagctggtctcaaacttgtggcctcaagcaatccacctgccttggcctcccaaagtgctgagattgcagatgtgagccaccgtgcctggccagatttttcttttattcttctttctttttcttttttgctttcttgtcttttcagaagcaagccagacctagcaggctgttccatgttctatttttgactgtagccacagctgctgttctcaggacagcatcccttcccacatgcctgcgcctgctgcctgctgagatgaggaggggagcgtctgggaacttgcgagtccaaggccagtccccatttctgcctcgctcaccgctggcccttagagaccccgaggtaggggtggggagatgcttctctccttgccccccgccctcatgggtcctagcccttccctgagtgcgggctgaggccagagtcaccttttctgtggctggctctaccttcctgtccctgaggttaaacggtgcccatcctgccatcctcaaacgacagaggagcttttctggaatttcaaaccattgctcttagtcccaagctaggcttaaacctggaatctacaagccaaaagtccctccctgcctgagggcagtaccctccattgggcacagtccagacccaagtcaaagatgccccattccttgcgcctcagccctcagttccttcatttccaccaggccgtgccttgtttgagtttttcctcccagtgagactgccccacggagacagaggaaagggctggctccccctccccaggctggagaccccccccaactccaggaaagagcagtcagagtccagtgctctgcctcagacgttgcctgagaagaagtggctgccacacccaggggaaggccctgaggcggaggctgtgctccgccatggtgtcccggtaccttccatacacagaggagtgcagccttctccatatctccatggccctgtcccaggccggcccagatgtgtcccccccaggccttgtcctacgtccaaggtggcagatgtcttccctgggctgccaccagcccccgccccagagtggcccaccgtggcactagaatgcaagtatcctgcgaccttgcaacctcaccttcctgtgggtgttctttcctgccctgtccaaaagcgccctcactattcttggaccatgccagattctgcctctctggaaagaggctctggacagcagaagcctccaagcacagagcctggccccaggccccagacagggtgggcttcctgcccttccctctgggcacgcctgctggccgacccactgacccactcggatggaccaacctgctctgtccccaaaggacgcctgcaggagagagcagcactccgcatcacctcaccaaggatcggactctgcccctggacctgggaacgactggactgtcacggggttccctcctagctctcccagtgaactcctgccaggcacacacagcccctatagcactgagctcacatgggactgggatatgggggcatctcttccccagagaggcactcagtgagcctcctgtgcctggccccagtctgggccatctcttaggtgagacagttgcccgaaactaagccaggcctggctggaggagcagcagcttggggagagggatttccctgcagacctcaagccatcatgcggtgggtgctgccatgacagaggctgcacccctgggccagcggggctgctcacccacctcttgtgcaaggtggcctttgtgctgcgcctgcaggcagagctggagcccccagcagaggcaggctgggacggaccagcatctggaagatgtacatagttatttttctctttgtggtttcttgtttggtttggtttgcttttgacagcttcattttatttttgacgtcactttttggccatgtaaactatttgtggcaattttatgtttttatttatgaataaagaatgccatttctcacgccctctaaaaaaaaaaaaaaaaaaaaaaaaaaaaaaaaaaa

SEQ ID NO: 45 - DNA, 1678 bp, Homo sapiens
gctccgagtggcggttgtttcaagatggcggacgtggcgggcccctcccgccccagtgccgcggcgttctggagccgggacttttctgatgaagaacaatcagtagtatacgttccaggaatttctgctgaaggaaatgtcagatcaagacacaagctgatgagtccaaaagctgatgttaaacttaagacttccagggtgactgatgcttcaatctccatggagtccttaaaaggcacaggagattcagtagatgaacagaattcctgcaggggagaaataaagagtgcatcattgaaggatttatgtcttgaagacaaaagacgcattgcaaacttaattaaagaactggccagagtaagtgaggaaaaggaagtgacagaggaaagactgaaagctgagcaggagtcatttgagaagaagatcaggcagttggaagaacagaatgaactgatcatcaaagaaagggaagatatccttttgaaagttctcttttttaacgttcaagaagtttgactatttctttttttttttgagacgaaatctcgctcttgtcgcctaggctgcagtgcaatggtgcgatttcagttcaccgcaacctccacctcccggttcaagcgattctcctaccccagctactcgggaggttgaggcaggagaatcgcttaaacccaggcggcagaggttgcagtgagccaagatcgcgccactgcactccagcctcagcaatagagtgagactgtctcaaaaaaaaaaaaaaaaaaaacctgccaattttcaaacataccgtagagattattttcaggtgccattttatagtatagcagcagggcttttactctgtgtatgcacagatgcagtctggggcatggtttgtgtgctggactttctcatggccatcatcagtatgcttatggatttgatgacaggcatagcctgggcatatcacctcattggtaaagggctagagcctttcttttttatggcacttctttttttgagatagggtcttactctgtcaccctggctagagtacactggtacaatcacggctcaatgtaggcttaacctcctgggctcaggtgtatgtcactatgcccggctactttttgtattttttggtagagacggcttcgccacgttgcccaggctgcaagcgatatgcctaggctcaagcgatctgcccacctcaacttccggaagtgctgagattacaggtgtgagccactgcacccagcctttgttttattttttattttttgagaggtatgattctttctagagattttttctcatggctactattagatcaggaatgggtgattggagattattagattctaggttaacttctaccactttaccctaatacataaaactttttcctaaataaatgatggaaggaataatacttggttacctggcattatttttcagtaagaaaaaagctttactaaccactacatttatggaaatttgtaggggtaagtattttataggtcataaaaaacaccataatataacgaatctcattttctttaaatgtgaattaaatcctaacagtcatctttataaaatgaccataggctaaaatcttacgtgtaagtactactacaataaataatttctgaaacctttaaaaaaaaaaaaaaaaaaaaaagaaaaaaaaaaaaaaaaa

SEQ ID NO: 46 - DNA, 3700 bp, Homo sapiens
tggaggccggggcgggacgcgttgtgcagcgggtaagcgcacggccgagcgagcatggagggggaccgggtggccgggcggccggtgctgtcgtcgttaccagtgctactgctgctgcagttgctaatgttgcgggccgcggcgctgcacccagacgagctcttcccacacggggagtcgtggggggaccagctcctgcaggaaggcgacgacgaaagctcagccgtggtgaagctggcgaatcccctgcacttctacgaagcccgattcagcaacctctacgtgggcaccaacggcatcatctccactcaggacttccccagggaaacgcagtatgtggactatgatttccccaccgacttcccggccatcgccccttttctggcggacatcgacacgagccacggcagaggccgagtcctgtaccgagtgaatgggaaagtgagtggccacctccacgtgggccatacacccgtgcacttcactgatgtggacctgcatgcgtatatcgtgggcaatgatggcagagcctacacggccatcagccacatcccacagccagcagcccaggccctcctccccctcacaccaattggaggcctgtttggctggctctttgctttagaaaaacctggctctgagaacggcttcagcctcgcaggtgctgcctttacccatgacatggaagttacattctacccgggagaggagacggttcgtatcactcaaactgctgagggacttgacccagagaactacctgagcattaagaccaacattcaaggccaggtgccttacgtcccagcaaatttcacagcccacatctctccctacaaggagctgtaccactactccgactccactgtgacctctacaagttccagagactactctctgacttttggtgcaatcaaccaaacatggtcctaccgcatccaccagaacatcacttaccaggtgtgcaggcatgcccccagacacccgtccttccccaccacccagcagctgaacgtggaccgggtctttgccttgtataatgacgaagaaagagtgcttagatttgctgtgaccaatcaaattggcccggtcaaagaagattcagaccccactccggtgaatccttgctatgatgggagccacatgtgtgacacaacagcacggtgccatccagggacaggtgtagattacacctgtgagtgcgcatctgggtaccagggagatggacggaactgtgtggatgaaaatgaatgtgcaactggctttcatcgctgtggccccaactctgtatgtatcaacttgcctggaagctacaggtgtgagtgccggagtgcttatgagtttgcagatgaccggcatacttgcatcttgatcaccccacctgccaacccctgtgaggatggcagtcatacctgtgctcctgctgggcaggcccggtgtgttcaccatggaggcagcacgttcagctgtgcctgcctgcctggttatgccggcgatgggcaccagtgcactgatgtagatgaatgctcagaaaacagatgtcaccctgcagctacctgctacaatactcctggttccttctcctgccgttgtcaacccggatattatggggatggatttcagtgcatacctgactccacctcaagcctgacaccctgtgaacaacagcagcgccatgcccaggcccagtatgcctaccctggggcccggttccacatcccccaatgcgacgagcagggcaacttcctgcccctacagtgtcatggcagcactggtttctgctggtgcgtggaccctgatggtcatgaagttcctggtacccagactccacctggctccaccccgcctcactgtggaccatcaccagagcccacccagaggcccccgaccatctgtgagcgctggagggaaaacctgctggagcactacggtggcaccccccgggatgaccagtacgtgccccagtgcgatgacctgggccacttcatccccctgcagtgccacggaaagagcgacttctgctggtgtgtggacaaagatggcagagaggtgcagggcacccgctcccagccaggcaccacccctgcgtgtatacccaccgtcgctccacccatggtccggcccacgccccggccagatgtgacccctccatctgtgggcaccttcctgctctatactcagggccagcagattggctacttacccctcaatggcaccaggcttcagaaggatgcagctaagaccctgctgtctctgcatggctccataatcgtgggaattgattacgactgccgggagaggatggtgtactggacagatgttgctggacggacaatcagccgtgccggtctggaactgggagcagagcctgagacgatcgtgaattcaggtctgataagccctgaaggacttgccatagaccacatccgcagaacaatgtactggacggacagtgtcctggataagatagagagcgccctgctggatggctctgagcgcaaggtcctcttctacacagatctggtgaatccccgtgccatcgctgtggatccaatccgaggcaacttgtactggacagactggaatagagaagctcctaaaattgaaacgtcatctttagatggagaaaacagaagaattctgatcaatacagacattggattgcccaatggcttaacctttgaccctttctctaaactgctctgctgggcagatgcaggaaccaaaaaactggagtgtacactacctgatggaactggacggcgtgtcattcaaaacaacctcaagtaccccttcagcatcgtaagctatgcagatcacttctaccacacagactggaggagggatggtgttgtatcagtaaataaacatagtggccagtttactgatgagtatctcccagaacaacgatctcacctctacgggataactgcagtctacccctactgcccaacaggaagaaagtaagtacagtaatgtaaaggaagacttggagtttacaatcagaacctggaccctaaagaacagtgactgcaaaggcaaagaaagtaaaaaaggaattggccattagacgttcctgagcatccaagatgaacattttgtagtgcaaaaagacttttgtgaaaagctgatacctcaatctttactactgtatttttaaaaatgaaggttgttattgcaagtttaaaaaggtaacagaattttaactgttgcttattaaagcaacttcttgtaaacatttatcattaatatttaaaagatcaaattcattcaactaagaattagagtttaagactctaaacctgatttttgccatggattccttctggccaagaaattaaagcacatgtgatcaatataacaatataatcctaaaccttgacagttggagaagccaatgcagaactgatgggaaaggaccaattatttatagtttcccaacaaaagttctaagattttttacctctgcatcagtgcatttctatttatatcaaaaggtgctaaaatgattcaatttgcattttctgatcctgtagtgcctctatagaagtacccacagaaagtaaagtatcacatttataaataccaaagatgtaacaattttaaaattttctagattactccaataaagtgttttaagttttcctatgaaaaaaaaaaaaaaaaaaaaaaaaaaaaaaaaaaaaaaaaaaaaaaaaaaaaa

SEQ ID NO: 47 - DNA, 3240 bp, Homo sapiens
gcccgcgccgccaccgcctcttccctccccgtgtccggtccccgtgcgtcccgaggctccccgccgcccgtcccggcgcgcaccgcgggcgtctgtccgaacgccttccagccacctgagccctcctgcgggcgactcgctcagctagcccgtgcccgcctccaccttctccgtcatcccctcttccttgcgtccggctctccactggggctgcacagtcgagggctgctcgcgtcgggaaggagatgcccagagtctctggggcgcaccctcccgtcccgctcagccgcacccagctttagaaggtgctctcagcagccactttcgggctctagcgaggacaccctctcgcagaagtccttgccgagaccccccgccccagccattctctgaaggggctgaggacactcttatcgcgcccctcatggccaagcctcggctgctagttctctacttcgctctgattgtggttccggcctgggtgtccagcattgtcctcacagggacaagcgagcccccagatgcgcagacagtggcgcctgcggaggacgagactctgcaaaacgaggcggacaaccaggagaacgttttatctcagttgctgggggactatgacaaggtcaaggctatgtctgagggctcggactgtcagtgcaagtgtgtggtgagacccctgggccgggatgcctgccagaggatcaatgcgggggcctccaggaaggaagacttctataccgtggaaaccatcacctcaggctcgtcgtgcaagtgtgcctgtgtagcacccccatcggccctcaatccctgcgagggagacttcaggctccagaagctgcgggaggcagacagccaggacttgaagctctccacaatcatagacatgttggaaggagcgttctatggcctggatctcctgaagctacattcagtcaccaccaaactggtggggcgagtggataaactggaggaggaagtgtctaaaaacctcaccaaggaaaacgaacaaatcaaagaggacatggaagaaattcgaaccgagatgaataagcgaggcaaagaaaattgctctgaaaacatcctagatagcatgccagacatccgctcagccctgcagagggatgcagcagcagcctacgcccacccagagtatgaagagcggtttctgcaggaagaaaccgtgtcccagcagatcaactccatcgaacttctgcagacgcgacccctggctctgcctgaggtggtgaagtcacagcggcccctgcagaggcaggtccacctgagaggccggccggcctcccagcccactgtcatccggggcatcacctactataaagccaaggtctctgaagaagagaatgacattgaagagcagcaagatgagtttttcagcggtgacaatggagtggatttgctgattgaagatcagctcctgagacacaacggcctgatgaccagtgtcacccggaggcctgcagccacccgtcagggacacagcactgctgtgacaagcgacctgaacgctcggaccgcaccctggtcctcagcactgccacagccctcgacctcagatcccagcatcgccaaccatgcctcagtgggaccaacactccaaacaacctcggtgtctccagatcccacaagggagtcagtcctgcagccttctcctcaggtaccagccaccactgtggcccacacagccacccagcaaccagcagccccagctcctccggcagtgtctcccagggaggcattgatggaagctatgcacacagtcccagtgcctcccaccacagtcagaacagactcgctggggaaagatgctcctgctgggtggggaacaacccctgccagccccacgctgagccccgaagaagaagatgacatccggaatgtcataggaaggtgcaaggacactctctccacaatcacggggccgaccacccagaacacatatgggcggaatgaaggggcctggatgaaggaccccctggccaaggatgagcggatttacgtaaccaactattactacggcaacaccctggtagagttccggaacctggagaacttcaaacaaggtcgctggagcaattcctacaagctcccgtacagctggatcggcacaggccacgtggtatacaatggcgccttctactacaatcgcgccttcacccgcaacatcatcaagtacgacctgaagcagcgctacgtggctgcctgggccatgctgcatgacgtggcctacgaggaggccaccccctggcgatggcagggccactcagacgtggactttgctgtggacgagaatggcctatggctcatctacccggccctggacgatgagggcttcagccaggaggtcattgtcctgagcaagctcaatgccgcggacctgagcacacagaaggagaccacatggcgcacggggctccggaggaatttctacggcaactgcttcgtcatctgtggggtgctgtatgccgtggatagctacaaccagcggaatgccaacatctcctacgctttcgacacccacaccaacacacagatcgtccccaggctgctgttcgagaatgagtattcctatacgacccagatagactacaaccccaaggaccgcctgctctatgcctgggacaatggccaccaggtcacttaccatgtcatctttgcctactgacacccttgtccccacaagcagaagcacagaggggtcactagcaccttgtgtgtatgtgtgtgcgcgcacgtgtgtgtaggtgggtatgtgttgtttaaaaatatatattattttgtataatattgcaaatgtaaaatgacaatttgggtctatttttttatatggattgtagatcaatccatacgtgtatgtgctggtctcatcctccccagtttatatttttgtgcaaatgaacttctccttttgaccagtaaccaccttccttcaagccttcagcccctccagctccaagtctcagatctcgaccattgaaaaggtttcttcatctgggtcttgcaggaggcaggcaacaccaggagcagaaatgaaagaggcaagaaagaagtgctatgtggcgagaaaaaaagttttaatgtattggagaagttttaaaaaacccagaaaaacgctttttttttttaataaagaagaaatttaaaatcaaaaaaaaaaaaaaaaaaaaaaaaaaaaaaaaaaaaaaaaaaaaaaaaaaaaaaaaaaaaaaaaaaaaaaaaaaaaaaaaa

SEQ ID NO: 48 - DNA, 3345 bp, Homo sapiens
gctggtggcgcccgccagccggcccgggagaggggacttgagcgcttcgcggccggtgcgcagcgcggctccggccccgcagtctgtctgcaagtggccatccccgcccccgactcctgcggccggtgcgggagctgtcagctgcacgttgcgggggtaccggagaagccggggttgccttctcccggttctgtgcgctaaccccggagcccggccccggggaactagggagcgtctccggctgcacagcgctcaggttttagggtttcctttgggccacccaaaatgttttttaaatactttggataagagctaaaccacctgccactggggacttccatactctcggctcccttgtcatctgatggcattttgattgtctcgaggccaagtgacttgctgtccatgatgagtgatgagaagaaccttggtgtgtcccaaaaattggtatcaccttcaaggagcacaagtagctgctcttccaagcaaggaagtcgacaggacagctgggaagtggtggaaggactgaggggggagatgaattacacccaggagccaccagttcagaaaggatttttgctgaaaaagaggaagtggcccttaaaaggctggcataagagattcttctatctggacaaaggaatcttgaaatatgccaagagccaaaccgatatagagagagagaagctgcatggctgcattgatgtcgggctctcagtgatgtctgtaaagaagtcatcaaaatgcatagaccttgacaccgaggagcacatctaccatctgaaggtcaagtcagaagaagtctttgatgagtgggtatcgaaacttcgccaccacagaatgtatcgtcagaatgaaattgccatgtttccacatgaagttaaccactttttctcagggtccaccatcacagactcttcatctggggtgtttgactccatttcaagtaggaagcgtagcagtatatcaaagcagaatttatttcaaactggaagcaatgtatcattttcttgtggtggtgagacacgagttccattatggttacagtcttcagaggacatggaaaaatgctccaaagacctggcgcactgtcatgcctacctggtagaaatgagccagctcctgcaaagcatggacgtcctgcatcggacatactcagcaccagctatcaacgccatccagggtggatcttttgaaagtcccaaaaaggaaaaaagatcgcacaggaggtggcggtccagagctattggcaaagatgctaaaggaacactgcaggtcccgaaacctttttctggcccagtaagactacactcctccaatcctaatttgtcaacactagattttggagaagagaaaaattattctgatggctctgaaacctcatcagagttttctaaaatgcaagaagatctgtgtcatattgcccataaagtttacttcactttaaggtcagcttttaatatcatgtcagcggagagagagaaactgaagcagctgatggagcaggatgcctcctcctccccgtctgctcaggtcattggtctgaagaacgccctgtcatccgccctagcacaaaacacagatcttaaagaacgcttacgcagaatccatgccgagtctctgctcctcgactcccccgctgtcgccaagtcgggtgacaatctggcagaggaaaactccagagatgaaaaccgagctctagttcatcagctttctaatgaaagtagactctccatcactgactccctttctgagttttttgatgctcaggaagttctgttatctccaagctcttcagaaaacgagatttctgatgatgactcatatgtcagtgacataagtgataatctttccttagataatctcagtaatgatttagataatgagagacagaccttggggcctgtccttgatagtggtcgggaagcgaagtcccggagaagaacgtgcctgccggcgccctgcccgagcagcagtaacatcagcctgtggaacatcctgaggaacaacatcgggaaggacctgtccaaggtggccatgccggtggagctgaacgagcccctgaacacgctgcagaggctctgcgaggagctggagtacagcgagctcctggacaaggccgcgcagattcccagccccctggaaaggatggtatatgtggcagcctttgccatatcagcgtatgcatctagctactaccgagctggaagcaagccatttaatccggttcttggagaaacatatgaatgtattcgggaggacaagggcttccagtttttttcagaacaggtcagccaccatccgcctatctctgcgtgtcatgctgagtctagaaattttgttttctggcaagatgtgagatggaaaaacaaattctggggcaaatccatggaaattgttccaattggcacaacccatgtgactctgccagtttttggggatcattttgagtggaacaaagtgacctcttgcatccataacatcttaagcgggcagaggtggattgagcactatggagagattgtcatcaagaacctgcatgatgattcctgctactgcaaagtgaattttataaaggcaaaatactggagcactaatgcccatgagattgaaggcacagtgtttgacaggagtggaaaagcggttcatcggctgtttgggaaatggcatgaaagcatctactgtggcggcggctcctcttctgcctgtgtatggagagcaaatcctatgccgaaaggctacgagcaatactatagcttcacacagtttgcgctggaattaaatgaaatggatccatcatcaaagtctttattgccacctactgacactcgatttaggccagaccagaggtttctagaggaagggaacttagaagaagctgaaatacaaaagcagaggattgaacaactgcagagagaaaggcggcgggtcttagaagaaaatcatgtggagcaccagcctcggtttttcaggaaatccgacgatgactcttgggtgagcaacggcacctatttggaacttagaaaagatcttggtttttccaaactggaccatcctgtcttatggtgaaaaagtaaagaagaaagataacattagtgtatttctcctgtgcttgccttctgaagtggcacaaacctgtgtttatatatttaaaagatactctaggatgatcacttgtgcttagcttagcattgtaactctttaagtctatattttcctcagtgcgtttctttacaatttcaaatgttaccctgattgtttatatgaatgtagaacaccttgacatttctttttatatataaactatttaataaaaatgaaagattgaaaaaaaaaaaaaaaaaa

SEQ ID NO: 49 - DNA, 1684 bp, Homo sapiens
cggacgcgtgggcatgtatgtaccagcagtggttacttgcattgtgtagtgtttttcaagaggtctgggtcttaacaaaatgttttcctttatctcagtgctcttctgcctctttttgttggtgtcctttgagaacaatacaccttctattccttcatttggttacacctttccttgtgacatttagcgagtttcaaacttacttccatatgaggctaagaaacctcaaatttcaggaattgggaaaaataaaattagcacttgcagaagtagcagcagatgggaaaatgccttgattgacattttctttcagcatttaaaatttttggcattttacagcttcatgacaaacagttttgtgcccataccttagaaaatgtggtgctgagttaaataaaggctgtttgagcactggagcagaaaaatgcattatttgcaaactggtggataattttgtgccttctcttctggccaccaagccagtgtagaaacagcaaaaatgtcataaaaattcttatatttaaaacaaaaacaaaagcaaaaacaaacattgaattaaattaagttttgtaattttaaactttaaaaacttctactgaaaatatttccgccaaatgccatcaatattttagactgtacctcgtttgcaaaactgctttgagagggaagagtggacaactcccatcagccttattctcttgagaactatattttggttcctagtaacagcctttccaaagctctactcttggtttttattactcataaatgtttaaattagaaaagaagggaccttgtacatgtgaaacctaattgactctctatattttggacaatttatgtatctgaaatgtgttgtctctgttatatgatgttatttttgccaggagactacaggttgatttagcttgatagctgaaatttgatggaaaactgatttccatttagtcttaccaagtgttgcttctctcttactagacagatatccacttagtaaaatctaaagcagtatgtaaatgaaaccagcaaagagagtagggtttattttataaacattcttaatgctaagtaaccagttgttcaatttattatatgtgtctgaggacattaaaacaccataagattgtaataattggttgtgccaatgtgtgagggatttacctttaggctctctgtcaccagtgatttactagtgttagctgtttaacacattatctgtatttagtagtgattatttatttacaagttggtggtaattcagcagtcaggactctaagcttttatagttgaattgaggaaatctcgcttttattcatttagctggcaactgcctttattgcagacctctggtgcttggctttcaaggaagcctatgagatgccaaaatcacacctttagagagcaccttgctctaataggtgatgcatgagcaaacagtgagatttgaaggggttttaacataatttagaatgtgaaaaaaatatcaattcatatctttcaagtactaacccctcaaaaaagcccacacatacaaaatatgtgatgtgataccactttgtcttttaggtctttaagtaactgaagttaagcacagaaaaaaaaatcacttcatggaaatttcagtaagaaacccaaacttctaaaaattgcttgcagatgagctagaaaaaaaaaaaaaaaaaaa

SEQ ID NO: 50 - DNA, 7992 bp, Homo sapiens
cgctgggcaacgtgggcaacgcggcgggcggcgggctcgcgcggcgggaggggcagcggcggcgcgcccgggctctacctcccgggctctgcctcccgggctctgcctctcgggcacttgcctggctcctgcgcgttcctgggcatcggctctgcagctgacacacagtagcggggacacccgacgccgctagcgacaggcgcgcggacggctggtcccagagggacgctgcgcttggggacgccggcgagactcgccaggagccaagaggaaacaggaatcattcaaactggattttaaaatcattgcaaatcagtgatggatcagaagttgcagagtgcaatcccgagtaaaagtcttcaaaaaattttgcttcaggtaacagaggaaggaaaattgatctaccaccttaaaaccctgatctagaaaaaatatatattcatgataggaagttataactaagaaaatttatttgcctcttaatgctcctgaatgaaaggaattatccctttgttctttgggaggacttgtgtatctgagattgttgtaataatcagtcattttattaaaaccttgacatgatcaccagggaggaaaaatagagcaatagtcaaaacctgtgtgttagtccaagatgacttctgaagaaatgacagcttctgttctcatacctgtgactcagagaaaagtggtttctgcccagtcggctgcagatgaaagtagtgaaaaggtctcagacatcaatatttcaaaagcacatactgtcagacgaagtggggagacttctcataccatctcacaactgaacaaacttaaagaagaaccttctggaagcaacttgccaaagattctctcaatagcgagggagaaaatagtgagtgatgagaacagtaatgaaaaatgttgggagaaaatcatgccagattctgcgaaaaaccttaacattaactgcaacaacatattgagaaaccatcagcatggccttcctcagagacaattttatgaaatgtacaactctgttgctgaggaagacttgtgtttagaaactggaattccttctccactggaaagaaaggtgttccctggaattcaactggaactagacagaccttccatgggcattagtcctttaggaaatcagtcagtgatcatagagacaggcagagcacaccctgacagcagaagggcagtatttcattttcattatgaagttgacagaagaatgtcagacactttctgtaccctatcagaaaacttaattttagacgattgtggaaattgtgtaccactacctgggggtgaggagaagcaaaagaaaaactatgtggcatatacctgtaaactgatggaattggccaaaaattgtgataataagaatgagcagctgcagtgtgatcattgtgacaccttgaatgataaatacttttgctttgaaggctcttgtgagaaggttgacatggtatattcaggtgatagcttttgtaggaaagactttactgacagtcaagctgccaagacctttttgagccattttgaggacttccctgataattgtgatgatgtagaagaagacgcttttaaaagcaaaaaggagcgatccactttgttagtcaggagattctgtaaaaatgacagagaagttaagaaatctgtgtatactggaacaagagcaattgtgagaactctgccttctggccacattgggctgactgcatggagttacatagatcagaagagaaatggtcccttactgccttgtgggagagtaatggaacccccgtcaacagtggagataaggcaagatgggagccaacgtctgtcagaagcccagtggtatcctatctacaatgcagtgagaagagaagaaacagaaaatacagttggatctctactccatttcctcaccaagctcccagcctccgagacagcccatggaaggataagcgttggtccatgcttaaagcaatgtgtccgagacactgtatgtgagtatcgcgccaccctccaaaggacttcaatatcgcagtacatcaccggttctctcctagaagcaaccacgtctttgggagcaagaagtggccttctcagtacttttggaggatccactggacgaatgatgctgaaagaacgccagccaggcccctctgtggccaattccaatgccctcccttcaagttcagctgggatcagcaaggagctgatcgatctgcagcctctcatccagttcccagaggaagtcgccagcatcctgatggagcaagagcagactatttaccgcagggtcttgccagtcgactacctttgcttcttaacacgggacttgggcactcctgaatgccagagctccttgccctgcctcaaagcatccatctcagcgtcgattcttaccactcagaatggagagcacaatgcccttgaagatctggtgatgaggtttaatgaggtgagctcctgggtgacatggctgatcctcacggcaggctccatggaggagaagcgagaagtcttttcatatttggtgcatgtggccaaatgctgctggaacatgggcaactacaacgctgtcatggagttcttggctggcctcaggtcaagaaaagttttaaaaatgtggcagttcatggaccagtctgatattgagaccatgaggagcctgaaggatgctatggcccagcatgagtcctcttgtgagtacagaaaggtggtgacacgtgccctgcacatccctggctgtaaggtggttccattctgtggggtgtttctgaaggagctctgtgaagtgcttgacggcgcctccggtctcatgaagctttgcccgcggtacaattcccaagaagaaactttagagtttgtagcagattacagtggacaagataatttcttacaacgagtgggacaaaatggcttaaagaattcggagaaggagtccactgtcaacagcatctttcaggtcatccggagctgcaatcgaagtctggagacagacgaggaggacagccccagtgaaggaaacagctccaggaaaagctccttgaaggataaaagccgatggcagtttataattggagatttgttggattcagacaatgacatctttgagcaatccaaagaatacgactctcatggttcagaggactcacagaaggccttcgaccatgggacggagctcatcccttggtacgtgctgtccatccaagccgatgtgcaccagttcctgctgcagggggccacggtcatccactacgaccaggacacacacctctctgcccgctgcttcctccagcttcagcccgacaatagcaccttgacctgggtaaagcccacaactgcctccccagccagcagtaaagcaaaacttggtgtacttaataacacagctgagcctggaaaattcccactactgggtaatgctggattaagtagcctgacggaaggggtcttggatctttttgcagtgaaggctgtatacatgggccaccctggcattgatatacacactgtgtgtgttcagaacaaactgggtagcatgttcctgtcagagactggtgtgacattgctctatgggcttcagaccacagacaacagattattgcacttcgtggcaccaaagcacacagctaaaatgctcttcagcggattattggaactcactagagctgtgagaaagatgaggaaattccctgaccaaagacagcagtggctgcggaaacagtacgtcagcctttatcaggaggatggacggtatgaaggcccaactttggctcacgctgtggagttgtttggtggcagacggtggagtgctcgaaaccccagccccggaacatcagcaaagaatgctgagaagcccaatatgcagagaaacaataccctgggcataagcactaccaagaaaaagaagaaaatcctcatgaggggtgagagtggagaggtaactgacgatgagatggcaacccgaaaggccaagatgcacaaagagtgtcgaagccggagtggttctgatcctcaagacattaatgaacaagaagaatcagaggtgaatgccatcgctaaccctccaaaccccctcccttccagaagagcccactctttgaccacagctgggtcccccaacttggctgccgggacgtcatctcccatcaggccagtgtcctcccctgtgctgtcttcttcaaacaagagcccatccagtgcttggagcagtagtagctggcacgggcggatcaaaggcggcatgaagggatttcagagcttcatggtttcagatagcaacatgagttttgttgaatttgttgagctgttcaaatcattcagtgtcaggagccgcaaggacctgaaggatctgtttgatgtctatgcagtgccctgcaaccgatctggctccgagtcagccccactctacaccaacctgacaattgatgaaaacaccagcgatcttcagcctgacctagatctgttgaccagaaatgtctcggatttggggttgttcattaagagtaaacagcagctatcggacaaccagaggcagatatctgatgccattgctgctgcaagcattgtgacaaatggcactgggattgagagcacatctctgggcatttttggggtgggcatacttcagctcaacgatttcctcgtgaattgccaaggagaacactgcacttatgatgaaatcctcagcatcatccagaagttcgagcctagcatcagtatgtgtcatcagggactaatgtcatttgaagggtttgccaggtttctgatggataaagaaaattttgcctcaaaaaatgatgagtcacaggagaacattaaagaactgcagctacccctctcatactattacatcgaatcttcgcacaatacctacctcacgggccatcagctcaaaggagaatcctcggtagaactctacagccaggtccttttgcaaggctgtcgaagtgtagaattggactgctgggacggagacgatgggatgcccatcatttatcatggacatacgctgacaaccaagatccccttcaaggaagtggttgaagccattgatcgcagtgccttcatcaactctgacctgccaatcatcatatcgattgagaaccactgttcattgcctcagcaacgaaaaatggcagaaattttcaagactgtgtttggagaaaagctggtgactaaattcttatttgagactgatttctcagatgatccaatgcttccttcacctgaccaactcagaaagaaagttcttcttaaaaacaagaagctaaaagcccatcagacgccagtggatatcttaaagcaaaaggctcatcagttagcatctatgcaagtgcaggcttataatggtgggaatgccaacccccgacctgccaataatgaggaagaggaagatgaggaggacgaatatgattatgactatgaatccctttctgatgacaacattctggaagacagacctgaaaataaatcatgtaatgacaagcttcagtttgaatataatgaagaaatcccaaagaggataaagaaagcagataactctgcttgcaacaaaggaaaggtttatgatatggaactgggagaagaattttatcttgatcagaataaaaaggaaagcagacagattgcaccagagctttctgaccttgtaatctattgtcaagcagtaaaatttccaggactgtcaactctaaatgcatctggctctagcagaggaaaagaaaggaaaagcaggaagtccatttttggcaacaatccgggcagaatgagcccaggggagacagcatcatttaacaaaacatctggaaaaagttcctgtgaaggcattcgacagacctgggaggaatcttcttcccctctcaacccaaccacgtccctcagtgctatcattagaactcccaaatgttatcatatctcgtcgctgaatgaaaatgccgccaaacgtctgtgtcgcaggtattctcagaaactgacccagcacaccgcctgtcagctgctgagaacttaccctgctgccacccgcatcgactcttccaacccgaaccccctcatgttctggctccatgggatacagcttgtggcactcaactaccagactgatgatctccctttacatttaaatgctgcaatgtttgaggcaaatggtggttgtggttatgtattgaaacctccagttctgtgggacaagaactgccccatgtatcagaagttttctccactagaaagagatctggacagcatggatcctgcagtctattctttaactattgtctctggtcagaatgtgtgccccagtaatagcatgggaagcccgtgcattgaagtcgacgtcctgggcatgcctctggacagctgccatttccgcacaaagcccatccatcgaaacaccctgaaccccatgtggaacgagcagtttctgttccacgttcacttcgaagatcttgtatttcttcgttttgcagttgtggaaaacaatagttcagcggtaactgctcagagaatcattccactgaaagctttaaaacgaggatatcgacatcttcagctgcgaaaccttcacaatgaagtcttggagatttctagtttattcattaacagcagaaggatggaagaaaattcctctggcaataccatgtcagcctcttcgatgtttaatacagaagaaagaaaatgtttgcagactcacagagtcacggtgcatggggtcccagggccagagccctttaccgttttcactattaatggaggcaccaaggcaaagcagcttctgcagcaaattctgacaaatgaacaagacatcaaacctgttaccacagactattttttgatggaagaaaaatattttatatctaaagaaaagaatgaatgtaggaaacaaccattccagagagccattggtccagaagaggagatcatgcaaattttaagcagctggtttccagaagagggatacatgggcaggattgtcttaaaaacccagcaggaaaacctagaagagaaaaacattgttcaagatgacaaagaggtgatcttgagctcagaggaggagagtttctttgtccaagtgcatgatgtttctccagagcaacctcgaacagtcatcaaagcaccccgcgtcagcactgcacaggatgtcattcagcagaccttatgcaaagccaaatattcctacagcatcctgagcaaccccaatccaagcgactatgtgcttttggaagaggtggtgaaagacactaccaacaagaagactaccacaccaaagtcctctcagcgggtccttctggatcaggagtgtgtgtttcaagcccaaagcaagtggaaaggtgcaggaaaattcatccttaagctaaaggagcaggtgcaggcatctcgagaagataaaaagaaaggcatttctttcgcaagtgaactcaagaagctcaccaagtcaactaaacagccccgaggacttacatcaccttctcagctcttgacctcagaaagtatccaaaccaaggaggagaaacctgtgggtggcttgtcctccagtgacacaatggattaccgacagtgactaagggcagcatgtttaacccaggtgaagatctttaagcaagaagttaaagagtgaacatggtggaaaaaatataattattttcatcagacttaaactggaaattgatgatttctgaactgaagccttcacacatgtgagatccatgctgaggagaagcaaaatggcacagggctagttgccaccaaccaatttactgatgaatgaagcccaggggactgccattttataaatgtcagcagttggaaaaatcgtcacgaattgacttagagcaagggtcagcaagcttgtctgtaaagggccaaacagtaaatattttagggctgggggccataaaatatgttgcaaccacccaattctgccattgtagtgcaaaagcagccatagacaacacatacatgaacgaacgtggctgtattccaataaaactttatttatggacactgaaa

SEQ ID NO: 51 - DNA, 2405 bp, Homo sapiens
agctccgctcgcgctctcgccgctcctgccggctcgcccggccccgcgctccgccgtctcctcgccgcccgcccctccgccagccccggggaccgcgcggccgcagcctgagccagggccccctccctcgtcaggaccggggcagcaagcaggccgggggcaggtccgggcacccaccatgcgaggcgagctctggctcctggtgctggtgctcagggaggctgcccgggcgctgagcccccagcccggagcaggtcacgatgagggcccaggctctggatgggctgccaaagggaccgtgcggggctggaaccggagagcccgagagagccctgggcatgtgtcagagccggacaggacccagctgagccaggacctgggtgggggcaccctggccatggacacgctgccagataacaggaccagggtggtggaggacaaccacagctattatgtgtcccgtctctatggccccagcgagccccacagccgggaactgtgggtagatgtggccgaggccaaccggagccaagtgaagatccacacaatactctccaacacccaccggcaggcttcgagagtggtcttgtcctttgatttccctttctacgggcatcctctgcggcagatcaccatggcaactggaggcttcatcttcatgggggacgtgatccatcggatgctcacagctactcagtatgtggcgcccctgatggccaacttcaaccctggctactccgacaactccacagttgtttactttgacaatgggacagtctttgtggttcagtgggaccacgtttatctccaaggctgggaagacaagggcagtttcaccttccaggcagctctgcaccatgacggccgcattgtctttgcctataaagagatccctatgtctgtcccggaaatcagctcctcccagcatcctgtcaaaaccggcctatcggatgccttcatgattctcaatccatccccggatgtgccagaatctcggcgaaggagcatctttgaatatcaccgcatagagctggaccccagcaaggtcaccagcatgtcggccgtggagttcaccccattgccgacctgcctgcagcataggagctgtgacgcctgcatgtcctcagacctgaccttcaactgcagctggtgccatgtcctccagagatgctccagtggctttgaccgctatcgccaggagtggatggactatggctgtgcacaggaggcagagggcaggatgtgcgaggacttccaggatgaggaccacgactcagcctcccctgacacttccttcagcccctatgatggagacctcaccactacctcctcctccctcttcatcgacagcctcaccacagaagatgacaccaagttgaatccctatgcaggaggagacggccttcagaacaacctgtcacccaagacaaagggcactcctgtgcacctgggcaccatcgtgggcatcgtgctggcagtcctcctcgtggcggccatcatcctggctggaatttacatcaatggccaccccacatccaatgctgcgctcttcttcatcgagcgtagacctcaccactggccagccatgaagtttcgcagccaccctgaccattccacctatgcggaggtggagccctcgggccatgagaaggagggcttcatggaggctgagcagtgctgagaacaccaagtctcccctttgaagactttgaggccacagaaaagacagttaaagcaaagaagagaagtgacttttcctggcctctcccagcatgccctgggctgagatgagatggtggtttatggctccagagctgctgctcgcttcgtcagcacaccccgaatattgaagagggggccaaaaaacaaccacatggattttttataggaacaacaacctaatctcatcctgttttgatgcaagggttctcttctgtgtcttgtaaccatgaaacagcagaagaactaacataactaactccatttttgtttaaggggcctttacctattcctgcacctaggctaggataactttagagcactgacataaaacgcaaaaacaggaatcatgccgtttgcaaaactaactctgggattaaaggggaagcatgtaaacagctaactgtttttgttaaagatttataggaatgaggaggtttggctattgtcacatgacagactgttagccaaggacaaagaagttctgcaaacctcccctggacccttgctggtgtccagatgtctgcggttgtcagccccttcctttcccccgacctaaacataaaagacaaggcaaagcccgcataattttaagacggttctttaggacattagtccaccatcttcttggtttgctggctctccgaaataaagtccctttccttgctccaaaaaaaaaaaaaaaa

SEQ ID NO: 52 - DNA, 5165 bp, Homo sapiens
gggaagccagacggttaacacagacaaagtgctgccgtgacactcggccctccagtgttgcggagaggcaagagcagcgaccgcggcacctgtccgcccggagctgggacgcgggcgcccgggcggccggacgaagcgaggagggaccgccgaggtgcgcgtctgtgcggctcagcctggcgggggacgcggggagaatgtggactgggtagagatgaacgagacttttctcagatgttggatatttgcttggaaaaacgtgtgggtacgaccttggctgcccccaagtgtaactccagcactgtgaggtttcagggattggcagaggggaccaaggggaccatgaaaatggacatggaggatgcggatatgactctgtggacagaggctgagtttgaagagaagtgtacatacattgtgaacgaccacccctgggattctggtgctgatggcggtacttcggttcaggcggaggcatccttaccaaggaatctgcttttcaagtatgccaccaacagtgaagaggttattggagtgatgagtaaagaatacataccaaagggcacacgttttggacccctaataggtgaaatctacaccaatgacacagttcctaagaacgccaacaggaaatatttttggaggatctattccagaggggagcttcaccacttcattgacggctttaatgaagagaaaagcaactggatgcgctatgtgaatccagcacactctccccgggagcaaaacctggctgcgtgtcagaacgggatgaacatctacttctacaccattaagcccatccctgccaaccaggaacttcttgtgtggtattgtcgggactttgcagaaaggcttcactacccttatcccggagagctgacaatgatgaatctcacacaaacacagagcagtctaaagcaaccgagcactgagaaaaatgaactctgcccaaagaatgtcccaaagagagagtacagcgtgaaagaaatcctaaaattggactccaacccctccaaaggaaaggacctctaccgttctaacatttcacccctcacatcagaaaaggacctcgatgactttagaagacgtgggagccccgaaatgcccttctaccctcgggtcgtttaccccatccgggcccctctgccagaagactttttgaaagcttccctggcctacgggatcgagagacccacgtacatcactcgctcccccattccatcctccaccactccaagcccctctgcaagaagcagccccgaccaaagcctcaagagctccagccctcacagcagccctgggaatacggtgtcccctgtgggccccggctctcaagagcaccgggactcctacgcttacttgaacgcgtcctacggcacggaaggtttgggctcctaccctggctacgcacccctgccccacctcccgccagctttcatcccctcgtacaacgctcactaccccaagttcctcttgcccccctacggcatgaattgtaatggcctgagcgctgtgagcagcatgaatggcatcaacaactttggcctcttcccgaggctgtgccctgtctacagcaatctcctcggtgggggcagcctgccccaccccatgctcaaccccacttctctcccgagctcgctgccctcagatggagcccggaggttgctccagccggagcatcccagggaggtgcttgtcccggcgccccacagtgccttctcctttaccggggccgccgccagcatgaaggacaaggcctgtagccccacaagcgggtctcccacggcgggaacagccgccacggcagaacatgtggtgcagcccaaagctacctcagcagcgatggcagcccccagcagcgacgaagccatgaatctcattaaaaacaaaagaaacatgaccggctacaagacccttccctacccgctgaagaagcagaacggcaagatcaagtacgaatgcaacgtttgcgccaagactttcggccagctctccaatctgaaggtccacctgagagtgcacagtggagaacggcctttcaaatgtcagacttgcaacaagggctttactcagctcgcccacctgcagaaacactacctggtacacacgggagaaaagccacatgaatgccaggtctgccacaagagatttagcagcaccagcaatctcaagacccacctgcgactccattctggagagaaaccataccaatgcaaggtgtgccctgccaagttcacccagtttgtgcacctgaaactgcacaagcgtctgcacacccgggagcggccccacaagtgctcccagtgccacaagaactacatccatctctgtagcctcaaggttcacctgaaagggaactgcgctgcggccccggcgcctgggctgcccttggaagatctgacccgaatcaatgaagaaatcgagaagtttgacatcagtgacaatgctgaccggctcgaggacgtggaggatgacatcagtgtgatctctgtagtggagaaggaaattctggccgtggtcagaaaagagaaagaagaaactggcctgaaagtgtctttgcaaagaaacatggggaatggactcctctcctcagggtgcagcctttatgagtcatcagatctacccctcatgaagttgcctcccagcaacccactacctctggtacctgtaaaggtcaaacaagaaacagttgaaccaatggatccttaagattttcagaaaacacttattttgtttcttaagttatgacttggtgagtcagggtgcctgtaggaagtggcttgtacataatcccagctctgcaaagctctctcgacagcaaatggtttcccctcacctctggaattaaagaaggaactccaaagttactgaaatctcagggcatgaacaaggcaaaggccatatatatatatatatatatatctgtatacatattatatatacttatttacacctgtgtctatatatttgcccctgtgtattttgaatatttgtgtggacatgtttgcatagccttcccattactaagactattacctagtcataattattttttcaatgataatccttcataatttattatacaatttatcattcagaaagcaataattaaaaaagtttacaatgactggaaagattccttgtaatttgagtataaatgtatttttgtcttgtggccattctttgtagataatttctgcacatctgtataagtacctaagatttagttaaacaaatatatgacttcagtcaacctctctctctaataatggtttgaaaatgaggtttgggtaattgccaatgttggacagttgatgtgttcattcctgggatcctatcatttgaacagcattgtacataacttgggggtatgtgtgcaggattacccaagaataacttaagtagaagaaacaagaaagggaatcttgtatatttttgttgatagttcatgtttttcccccagccacaattttaccggaagggtgacaggaaggctttaccaacctgtctctccctccaaaagagcagaatcctcccaccgccctgccctccccaccgagtcctgtggccattcagagcggccacatgacttttgcatccattgtattatcagaaaatgtgaagaagaaaaaaatgccatgttttaaaaccactgcgaaaatttccccaaagcataggtggctttgtgtgtgtgcgatttgggggcttgagtctgggtggtgttttgttgttggtttttgttgctttttttttttttttttttttaatgtcaaaattgcacaaacatggtgctctaccaggaaggattcgaggtagataggctcaggccacactttaaaaacaaacacacaaacaacaaaaaacgggtattctagtcatcttggggtaaaagcgggtaatgaacattcctatccccaacacatcaattgtattttttctgtaaaactcagattttcctcagtatttgtgtttttacattttatggttaatttaatggaagatgaaagggcattgcaaagttgttcaacaacagttacctcattgagtgtgtccagtagtgcaggaaatgatgtcttatctaatgatttgcttctctagaggagaaaccgagtaaatgtgctccagcaagatagactttgtgttattctatcttttattctgctaagcccaaagattacatgttggtgttcaaagtgtagcaaaaaatgatgtatatttataaatctatttataccactatatcatatgtatatatatttataaccacttaaattgtgagccaagccatgtaaaagatctactttttctaagggcaaaaaaaaaaaaaaaaaaaaaagaacactcctttctgagactttgcttaatacttggtgacctcacaatcacgtcggtatgattgggcacccttgcctactgtaagagaccctaaaaccttggtgcagtggtggggaccacaaaacaaccagggaggaagagatacatcattttttagtattaaggaccatctaagacagctctattttttttttgccactttatgattatgtggtcacacccaagtcacagaaataaaaaactgactttaccgctgcaatttttctgttttcctccttactaaatactgatacattactccaatctattttataattatatttgacattttgttcacatcaactaatgttcacctgtagaagagaacaaatttcgaataatccagggaaacccaagagccttactggtcttctgtaacttccaagactgacagctttttatgtatcagtgtttgataaacacagtccttaactgaaggtaaaccaaagcatcacgttgacattagaccaaatacttttgattcccaactactcgtttgttctttttctccttttgtgctttcccatagtgagaatttttataaagacttcttgcttctctcaccatccatccttctcttttctgcctcttacatgtgaatgttgagcccacaatcaacagtggttttattttttcctctactcaaagttaaaactgaccaaagttactggctttttactttgctagaacaacaaactatcttatgtttacatactggtttacaatgttatttatgtgcaaattgtcaaaatgtaaattaaatataaatgttcatgctttaccaaaaa

SEQ ID NO: 53 - DNA, 972 bp, Homo sapiens
agggggggcgcggaccgtgctgggagcggcgcggctggagcgcagcgccgaagggactggcagggctgaagtgtgcgggacagcaagcccccgaatagccccggctgccacctcgcaggacccaaggccacgcgcgccgggcccagctgagccgcctcatgaagcagcccgcggcgcagggcagccccgcggccgccgcggccgcagccccggccctggactcggcggccgcggaggacctgtcggacgcgctgtgcgagtttgacgcggtgctggccgacttcgcgtcgcccttccacgagcgccacttccactacgaggagcacctggagcgcatgaagcggcgcagcagcgccagtgtcagcgacagcagcggcttcagcgactcggagagtgcagattcactttataggaacagcttcagcttcagtgatgaaaaactgaattctccaacagactctaccccagctcttctctctgccactgtcactcctcagaaagctaaattaggagacacaaaagagctagaagccttcattgctgatcttgacaaaactttagcaagtatgtgaaacaagaagttctgggtcctttcatcataagggagaagcttcagaaagttccgaggacctgctaaaatcagctactagaatctgctgccagaggggacaaagacgtgcactcaaccttctaccaggccactctcaggctcaccttaaaatcagcccttgatcccatttctgggcaatttagacagtgaaactgactttgtttacctgcttgcagcatattagaacagacgatccatgctaatattgtattttctcttaaaacatagctttcctgtaatttaaagtgcttttatgaaaatatttgtaattaattatatatagttggaaatagcagtaagctttcccattataatatatttttgtatacaaataaaatttgaactgaaaaaaaaaaaaaaaa

SEQ ID NO: 54 - DNA, 1379 bp, Homo sapiens
gcgcgcagcagccatctccactccaaagttagacaaaatgccaggaatgttcttctctgctaacccaaaggaattgaaaggaaccactcattcacttctagacgacaaaatgcaaaaaaggaggccaaagacttttggaatggatatgaaagcatacctgagatctatgatcccacatctggaatctggaatgaaatcttccaagtccaaggatgtactttctgctgctgaagtaatgcaatggtctcaatctctggaaaaacttcttgccaaccaaactggtcaaaatgtctttggaagtttcctaaagtctgaattcagtgaggagaatattgagttctggctggcttgtgaagactataagaaaacagagtctgatcttttgccctgtaaagcagaagagatatataaagcatttgtgcattcagatgctgctaaacaaatcaatattgacttccgcactcgagaatctacagccaagaagattaaagcaccaacccccacgtgttttgatgaagcacaaaaagtcatatatactcttatggaaaaggactcttatcccaggttcctcaaatcagatatttacttaaatcttctaaatgacctgcaggctaatagcctaaagtgactggtccctggctgaagggaattaacagatagtatcaagcgcagaaggaatgtgccagtatggctccctgggtgaacagcttggccttttgtgggtgtcttgacagcccaagaagaacaaatgactcagaatggattaacatgaaagttatccaggcgcagagttgaagaagcataagcaagacaaaaacagagagaccgcagaaggaggaagatactgtggtactgtcataaaaaacagtggagctctgtattagaaagcccctcagaactgggaaggccaggtaactctagttacacagaaactgtgactaaagtctatgaaactgattacaacagactgtaagaatcaaagtcaactgacatctatgctacatattattatatagtttgtactgagctattgaagtcccattaacttaaagtatatgttttcaaattgccattgctactattgcttgtcggtgttattttattttattgtttttgactttggaagagatgaactgtgtatttaacttaagctattgctcttaaaaccagggagtcagaatatatttgtaagttaaatcattggtgctaataataaatgtggattttgtattaaaatatatagaagcaatttctgtttacatgtccttgctacttttaaaaacttgcatttattcctcagattttaaaaataaataaataattcatttaaaaaaaaaaaaaaaaaaaaaaaaaaaaaaaaaaaaaaaaaaaaaaaaaaa

SEQ ID NO: 55 - DNA, 2500 bp, Homo sapiens
cccaggcgcagccaatgggaagggtcggaggcatggcacagccaatgggaagggccggggcaccaaagccaatgggaagggccgggagcgcgcggcgcgggagatttaaaggctgctggagtgaggggtcgcccgtgcaccctgtcccagccgtcctgtcctggctgctcgctctgcttcgctgcgcctccactatgctctccctccgtgtcccgctcgcgcccatcacggacccgcagcagctgcagctctcgccgctgaaggggctcagcttggtcgacaaggagaacacgccgccggccctgagcgggacccgcgtcctggccagcaagaccgcgaggaggatcttccaggagcccacggagccgaaaactaaagcagctgcccccggcgtggaggatgagccgctgctgagagaaaacccccgccgctttgtcatcttccccatcgagtaccatgatatctggcagatgtataagaaggcagaggcttccttttggaccgccgaggaggttgacctctccaaggacattcagcactgggaatccctgaaacccgaggagagatattttatatcccatgttctggctttctttgcagcaagcgatggcatagtaaatgaaaacttggtggagcgatttagccaagaagttcagattacagaagcccgctgtttctatggcttccaaattgccatggaaaacatacattctgaaatgtatagtcttcttattgacacttacataaaagatcccaaagaaagggaatttctcttcaatgccattgaaacgatgccttgtgtcaagaagaaggcagactgggccttgcgctggattggggacaaagaggctacctatggtgaacgtgttgtagcctttgctgcagtggaaggcattttcttttccggttcttttgcgtcgatattctggctcaagaaacgaggactgatgcctggcctcacattttctaatgaacttattagcagagatgagggtttacactgtgattttgcttgcctgatgttcaaacacctggtacacaaaccatcggaggagagagtaagagaaataattatcaatgctgttcggatagaacaggagttcctcactgaggccttgcctgtgaagctcattgggatgaattgcactctaatgaagcaatacattgagtttgtggcagacagacttatgctggaactgggttttagcaaggttttcagagtagagaacccatttgactttatggagaatatttcactggaaggaaagactaacttctttgagaagagagtaggcgagtatcagaggatgggagtgatgtcaagtccaacagagaattcttttaccttggatgctgacttctaaatgaactgaagatgtgcccttacttggctgattttttttttccatctcataagaaaaatcagctgaagtgttaccaactagccacaccatgaattgtccgtaatgttcattaacagcatctttaaaactgtgtagctacctcacaaccagtcctgtctgtttatagtgctggtagtatcaccttttgccagaaggcctggctggctgtgacttaccatagcagtgacaatggcagtcttggctttaaagtgaggggtgaccctttagtgagcttagcacagcgggattaaacagtcctttaaccagcacagccagttaaaagatgcagcctcactgcttcaacgcagattttaatgtttacttaaatataaacctggcactttacaaacaaataaacattgttttgtactcacggcggcgataatagcttgatttatttggtttctacaccaaatacattctcctgaccactaatgggagccaattcacaattcactaagtgactaaagtaagttaaacttgtgtagactaagcatgtaatttttaagttttattttaatgaattaaaatatttgttaaccaactttaaagtcagtcctgtgtatacctagatattagtcagttggtgccagatagaagacaggttgtgtttttatcctgtggcttgtgtagtgtcctgggattctctgccccctctgagtagagtgttgtgggataaaggaatctctcagggcaaggagcttcttaagttaaatcactagaaatttaggggtgatctgggccttcatatgtgtgagaagccgtttcattttatttctcactgtattttcctcaacgtctggttgatgagaaaaaattcttgaagagttttcatatgtgggagctaaggtagtattgtaaaatttcaagtcatccttaaacaaaatgatccacctaagatcttgcccctgttaagtggtgaaatcaactagaggtggttcctacaagttgttcattctagttttgtttggtgtaagtaggttgtgtgagttaattcatttatatttactatgtctgttaaatcagaaattttttattatctatgttcttctagattttacctgtagttcataaaaaaaaaaaaaaaaaaaaaaaaa

SEQ ID NO: 56 - DNA, 3209 bp, Homo sapiens
gggcactcagggcccagagctcagccttgaccctgacccttgctctccccaatccactccggggctcatgaaggggaacaagctggaggagcaggaccctagacctctgcagcccataccaggtctcatggaggggaacaagctggaggagcaggactctagccctccacagtccactccagggctcatgaaggggaacaagcgtgaggagcaggggctgggccccgaacctgcggcgccccagcagcccacggcggaggaggaggccctgatcgagttccaccgctcctaccgagagctcttcgagttcttctgcaacaacaccaccatccacggcgccatccgcctggtgtgctcccagcacaaccgcatgaagacggccttctgggcagtgctgtggctctgcacctttggcatgatgtactggcaattcggcctgcttttcggagagtacttcagctaccccgtcagcctcaacatcaacctcaactcggacaagctcgtcttccccgcagtgaccatctgcaccctcaatccctacaggtacccggaaattaaagaggagctggaggagctggaccgcatcacagagcagacgctctttgacctgtacaaatacagctccttcaccactctcgtggccggctcccgcagccgtcgcgacctgcgggggactctgccgcaccccttgcagcgcctgagggtcccgcccccgcctcacggggcccgtcgagcccgtagcgtggcctccagcttgcgggacaacaacccccaggtggactggaaggactggaagatcggcttccagctgtgcaaccagaacaaatcggactgcttctaccagacatactcatcaggggtggatgcggtgagggagtggtaccgcttccactacatcaacatcctgtcgaggctgccagagactctgccatccctggaggaggacacgctgggcaacttcatcttcgcctgccgcttcaaccaggtctcctgcaaccaggcgaattactctcacttccaccacccgatgtatggaaactgctatactttcaatgacaagaacaactccaacctctggatgtcttccatgcctggaatcaacaacggtctgtccctgatgctgcgcgcagagcagaatgacttcattcccctgctgtccacagtgactggggcccgggtaatggtgcacgggcaggatgaacctgcctttatggatgatggtggctttaacttgcggcctggcgtggagacctccatcagcatgaggaaggaaaccctggacagacttgggggcgattatggcgactgcaccaagaatggcagtgatgttcctgttgagaacctttacccttcaaagtacacacagcaggtgtgtattcactcctgcttccaggagagcatgatcaaggagtgtggctgtgcctacatcttctatccgcggccccagaacgtggagtactgtgactacagaaagcacagttcctgggggtactgctactataagctccaggttgacttctcctcagaccacctgggctgtttcaccaagtgccggaagccatgcagcgtgaccagctaccagctctctgctggttactcacgatggccctcggtgacatcccaggaatgggtcttccagatgctatcgcgacagaacaattacaccgtcaacaacaagagaaatggagtggccaaagtcaacatcttcttcaaggagctgaactacaaaaccaattctgagtctccctctgtcacgatggtcaccctcctgtccaacctgggcagccagtggagcctgtggttcggctcctcggtgttgtctgtggtggagatggctgagctcgtctttgacctgctggtcatcatgttcctcatgctgctccgaaggttccgaagccgatactggtctccaggccgagggggcaggggtgctcaggaggtagcctccaccctggcatcctcccctccttcccacttctgcccccaccccatgtctctgtccttgtcccagccaggccctgctccctctccagccttgacagcccctccccctgcctatgccaccctgggcccccgcccatctccagggggctctgcaggggccagttcctccacctgtcctctgggggggccctgagagggaaggagaggtttctcacaccaaggcagatgctcctctggtgggagggtgctggccctggcaagattgaaggatgtgcagggcttcctctcagagccgcccaaactgccgttgatgtgtggaggggaagcaagatgggtaagggctcaggaagttgctccaagaacagtagctgatgaagctgcccagaagtgccttggctccagccctgtaccccttggtactgcctctgaacactctggtttccccacccaactgcggctaagtctctttttcccttggatcagccaagcgaaacttggagctttgacaaggaactttcctaagaaaccgctgataaccaggacaaaacacaaccaagggtacacgcaggcatgcacgggtttcctgcccagcgacggcttaagccagcccccgactggcctggccacactgctctccagtagcacagatgtctgctcctcctcttgaacttgggtgggaaaccccacccaaaagccccctttgttacttaggcaattccccttccctgactcccgagggctagggctagagcagacccgggtaagtaaaggcagacccagggctcctctagcctcatacccgtgccctcacagagccatgccccggcacctctgccctgtgtctttcatacctctacatgtctgcttgagatatttcctcagcctgaaagtttccccaaccatctgccagagaactcctatgcatcccttagaaccctgctcagacaccattacttttgtgaacgcttctgccacatcttgtcttccccaaaattgatcactccgccttctcctgggctcccgtagcacactataacatctgctggagtgttgctgttgcaccatactttcttgtacatttgtgtctcccttcccaactagactgtaagtgccttgcggtcagggactgaatcttgcccgtttatgtatgctccatgtctagcccatcatcctgcttggagcaagtaggcaggagctcaataaatgtttgttgcatgaagaaaaaaaaaaaaaaaaaaaaaaaaaaaaaaaaaaaaaaaaaaaaa

SEQ ID NO: 57 - DNA, 943 bp, Homo sapiens
gcagagcccagggagctggaggtcggcgcttcctctcgtgcttggtccactgacgcgcggccccgccgcgaggagcatcagatccatgctgctgctgactcggagccccacagcttggcacaggctctctcagctcaagcctccggtcctccctgggaccctgggaggccaggccctgcatctgaggtcctggcttttgtcaaggcagggccctgcagagacaggtgggcagggccagccccagggccctgggcttcgaacccggctgctgatcacaggcctgttcggggctggactcggtggggcctggctggccctgagggctgagaaggagaggctgcagcagcaaaagcgaacagaagccctgcgccaggcagctgtgggccagggcgacttccacctgctggatcacagaggccgggctcgctgcaaggctgacttccggggccagtgggtgctgatgtactttggcttcactcactgccctgacatctgcccagacgagctggagaagctggtgcaggtggtgcggcagctggaagcagagcctggtttgcctccagtgcagcctgtcttcatcactgtggaccccgagcgggacgacgttgaagccatggcccgctacgtccaggacttccacccaagactgttgggtctgaccggctccaccaaacaggttgcccaggctagtcacagttaccgcgtgtactacaatgccggccccaaggatgaggaccaggactacatcgtggaccactccattgccatctacctgctcaaccctgacggcctcttcacggattactacggccggagcagatcggctgagcagatctcagacagtgtgcggcggcacatggcggctttccgcagtgtcctgtcttgagccactgcagtctgggccccatcattaaacgggctgcgtttaaaaaaaaaaaaaaaa

SEQ ID NO: 58 - DNA, 2998 bp, Homo sapiens
acttttgggacatcctgttctgagtcaagattcctccttctgaacatgggactttccagaaggaccacagctcctcccgtgcatccactcggcctgggaggttctggattttggctgtcgagggagtttgcctgcctctccagagaaagatggtcatgaggcccctgtggagtctgcttctctgggaagccctacttcccattacagttactggtgcccaagtgctgagcaaagtcgggggctcggtgctgctggtggcagcgcgtccccctggcttccaagtccgtgaggctatctggcgatctctctggccttcagaagagctcctggccacgtttttccgaggctccctagagactctgtaccattcccgcttcctgggccgagcccagctacacagcaacctcagcctggagctcgggccgctggagtctggagacagcggcaacttctccgtgttgatggtggacacaaggggccagccctggacccagaccctccagctcaaggtgtacgatgcagtgcccaggcccgtggtacaagtgttcattgctgtagaaagggatgctcagccctccaagacctgccaggttttcttgtcctgttgggcccccaacatcagcgaaataacctatagctggcgacgggagacaaccatggactttggtatggaaccacacagcctcttcacagacggacaggtgctgagcatttccctgggaccaggagacagagatgtggcctattcctgcattgtctccaaccctgtcagctgggacttggccacagtcacgccctgggatagctgtcatcatgaggcagcaccagggaaggcctcctacaaagatgtgctgctggtggtggtgcctgtctcgctgctcctgatgctggttactctcttctctgcctggcactggtgcccctgctcagggaaaaagaaaaaggatgtccatgctgacagagtgggtccagagacagagaacccccttgtgcaggatctgccataaaggacaatatgaactgatgcctggactatcagtaaccccactgcacaggcacacgatgctctgggacataactggtgcctggaaatcaccatggtcctcatatctcccatgggaatcctgtcctgcctcgaaggagcagcctgggcagccatcacaccacgaggacaggaagcaccagcacgtttcacacctcccccttccctctcccatcttctcatatcctggctcttctctgggcaagatgagccaagcagaacattccatccaggacactggaagttctccaggatccagatccatggggacattaatagtccaaggcattccctcccccaccactattcataaagtattaaccaactggcaccaaggaattgcctccagcctgagtcctaggctctaaaagatattacatatttgaactaatagaggaactctgagtcacccatgccagcatcagcttcagccccagaccctgcagtttgagatctgatgcttcctgagggccaaggcattgctgtaagaaaaggtctagaaataggtgaaagtgagaggtgggggacaggggtttctctttctggcctaaggactttcaggtaatcagagttcatgggccctcaaaggtagattgcagttgtagacaccgaggatggttgacaacccatggttgagatgggcaccgttttgcaggaaacaccatattaatagacatcctcaccatctccatccgctctcacgcctcctgcaggatctgggagtgagggtggagagtctttcctcacgctccagcacagtggccaggaaaagaaatactgaatttgccccagccaacaggacgttcttgcacaacttcaagaaaagcagctcagctcaggatgagtcttcctgcctgaaactgagagagtgaagaaccataaaacgctatgcagaaggaacattatggagagaaagggtactgaggcactctagaatctgccacattcattttcaaatgcaaatgcagaagacttaccttagttcaaggggaggggacaaagaccccacagcccaacagcaggactgtagaggtcactctgactccatcaaactttttattgtggccatcttaggaaaatacattctgcccctgaatgattctgtctagaaaagctctggagtattgatcactactggaaaaacacttaaggagctaaacttaccttcggggattattagctgataaggttcacagtttctctcacccaggtgtaactggattttttctggggcctcaatccagtcttgataacagcgaggaaagaggtattgaagaaacaggggtgggtttgaagtactattttcccagggtggcttcaatctccccacctaggatgtcagccctgtccaaggaccttccctcttctccccagttcctgggcaatcacttcaccttggacaaaggatcagcacagctggcctccagatccacatcaccactcttccactcgattgttcccagatcctccctgcctggcctgctcagaggttccctgttggtaacctggctttatcaaattctcatccctttcccacacccacttctctcctatcaccttcccccaagattacctgaacagggtccatggccactcaacctgtcagcttgcaccatccccacctgccacctacagtcaggccacatgcctggtcactgaatcatgcaaaactggcctcagtccctaaaaatgatgtggaaaggaaagcccaggatctgacaatgagccctggtggatttgtggggaaaaaatacacagcactccccacctttctttcgttcatctccagggccccacctcagatcaaagcagctctggatgagatgggacctgcagctctccctccacaaggtgactcttagcaacctcatttcgacagtggtttgtagcgtggtgcaccagggccttgttgaacagatccacactgctctaataaagttcccatccttaatgaag

SEQ ID NO: 59 - DNA, 4950 bp, Homo sapiens
cagagcagggtggagagggcggtgggaggcgtgtgcctgagtgggctctactgccttgttccatattattttgtgcacattttccctggcactctgggttgctagccccgccgggcactgggcctcagacactgcgcggttccctcggagcagcaagctaaagaaagcccccagtgccggcgaggaaggaggcggcggggaaagatgcgcggcgttggctggcagatgctgtccctgtcgctggggttagtgctggcgatcctgaacaaggtggcaccgcaggcgtgcccggcgcagtgctcttgctcgggcagcacagtggactgtcacgggctggcgctgcgcagcgtgcccaggaatatcccccgcaacaccgagagactggatttaaatggaaataacatcacaagaattacgaagacagattttgctggtcttagacatctaagagttcttcagcttatggagaataagattagcaccattgaaagaggagcattccaggatcttaaagaactagagagactgcgtttaaacagaaatcaccttcagctgtttcctgagttgctgtttcttgggactgcgaagctatacaggcttgatctcagtgaaaaccaaattcaggcaatcccaaggaaagctttccgtggggcagttgacataaaaaatttgcaactggattacaaccagatcagctgtattgaagatggggcattcagggctctccgggacctggaagtgctcactctcaacaataacaacattactagactttctgtggcaagtttcaaccatatgcctaaacttaggacttttcgactgcattcaaacaacctgtattgtgactgccacctggcctggctctccgactggcttcgccaaaggcctcgggttggtctgtacactcagtgtatgggcccctcccacctgagaggccataatgtagccgaggttcaaaaacgagaatttgtctgcagtggtcaccagtcatttatggctccttcttgtagtgttttgcactgccctgccgcctgtacctgtagcaacaatatcgtagactgtcgtgggaaaggtctcactgagatccccacaaatcttccagagaccatcacagaaatacgtttggaacagaacacaatcaaagtcatccctcctggagctttctcaccatataaaaagcttagacgaattgacctgagcaataatcagatctctgaacttgcaccagatgctttccaaggactacgctctctgaattcacttgtcctctatggaaataaaatcacagaactccccaaaagtttatttgaaggactgttttccttacagctcctattattgaatgccaacaagataaactgccttcgggtagatgcttttcaggatctccacaacttgaaccttctctccctatatgacaacaagcttcagaccatcgccaaggggaccttttcacctcttcgggccattcaaactatgcatttggcccagaacccctttatttgtgactgccatctcaagtggctagcggattatctccataccaacccgattgagaccagtggtgcccgttgcaccagcccccgccgcctggcaaacaaaagaattggacagatcaaaagcaagaaattccgttgttcagctaaagaacagtatttcattccaggtacagaagattatcgatcaaaattaagtggagactgctttgcggatctggcttgccctgaaaagtgtcgctgtgaaggaaccacagtagattgctctaatcaaaagctcaacaaaatcccggagcacattccccagtacactgcagagttgcgtctcaataataatgaatttaccgtgttggaagccacaggaatctttaagaaacttcctcaattacgtaaaataaactttagcaacaataagatcacagatattgaggagggagcatttgaaggagcatctggtgtaaatgaaatacttcttacgagtaatcgtttggaaaatgtgcagcataagatgttcaagggattggaaagcctcaaaactttgatgttgagaagcaatcgaataacctgtgtggggaatgacagtttcataggactcagttctgtgcgtttgctttctttgtatgataatcaaattactacagttgcaccaggggcatttgatactctccattctttatctactctaaacctcttggccaatccttttaactgtaactgctacctggcttggttgggagagtggctgagaaagaagagaattgtcacgggaaatcctagatgtcaaaaaccatacttcctgaaagaaatacccatccaggatgtggccattcaggacttcacttgtgatgacggaaatgatgacaatagttgctccccactttctcgctgtcctactgaatgtacttgcttggatacagtcgtccgatgtagcaacaagggtttgaaggtcttgccgaaaggtattccaagagatgtcacagagttgtatctggatggaaaccaatttacactggttcccaaggaactctccaactacaaacatttaacacttatagacttaagtaacaacagaataagcacgctttctaatcagagcttcagcaacatgacccagctcctcaccttaattcttagttacaaccgtctgagatgtattcctcctcgcacctttgatggattaaagtctcttcgattactttctctacatggaaatgacatttctgttgtgcctgaaggtgctttcaatgatctttctgcattatcacatctagcaattggagccaaccctctttactgtgattgtaacatgcagtggttatccgactgggtgaagtcggaatataaggagcctggaattgctcgttgtgctggtcctggagaaatggcagataaacttttactcacaactccctccaaaaaatttacctgtcaaggtcctgtggatgtcaatattctagctaagtgtaacccctgcctatcaaatccgtgtaaaaatgatggcacatgtaatagtgatccagttgacttttaccgatgcacctgtccatatggtttcaaggggcaggactgtgatgtcccaattcatgcctgcatcagtaacccatgtaaacatggaggaacttgccacttaaaggaaggagaagaagatggattctggtgtatttgtgctgatggatttgaaggagaaaattgtgaagtcaacgttgatgattgtgaagataatgactgtgaaaataattctacatgtgtcgatggcattaataactacacatgcctttgcccacctgagtatacaggtgagttgtgtgaggagaagctggacttctgtgcccaggacctgaacccctgccagcacgattcaaagtgcatcctaactccaaagggattcaaatgtgactgcacaccagggtacgtaggtgaacactgcgacatcgattttgacgactgccaagacaacaagtgtaaaaacggagcccactgcacagatgcagtgaacggctatacgtgcatatgccccgaaggttacagtggcttgttctgtgagttttctccacccatggtcctccctcgtaccagcccctgtgataattttgattgtcagaatggagctcagtgtatcgtcagaataaatgagccaatatgtcagtgtttgcctggctatcagggagaaaagtgtgaaaaattggttagtgtgaattttataaacaaagagtcttatcttcagattccttcagccaaggttcggcctcagacgaacataacacttcagattgccacagatgaagacagcggaatcctcctgtataagggtgacaaagaccatatcgcggtagaactctatcgggggcgtgttcgtgccagctatgacaccggctctcatccagcttctgccatttacagtgtggagacaatcaatgatggaaacttccacattgtggaactacttgccttggatcagagtctctctttgtccgtggatggtgggaaccccaaaatcatcactaacttgtcaaagcagtccactctgaattttgactctccactctatgtaggaggcatgccagggaagagtaacgtggcatctctgcgccaggcccctgggcagaacggaaccagcttccacggctgcatccggaacctttacatcaacagtgagctgcaggacttccagaaggtgccgatgcaaacaggcattttgcctggctgtgagccatgccacaagaaggtgtgtgcccatggcacatgccagcccagcagccaggcaggcttcacctgcgagtgccaggaaggatggatggggcccctctgtgaccaacggaccaatgacccttgccttggaaataaatgcgtacatggcacctgcttgcccatcaatgcgttctcctacagctgtaagtgcttggagggccatggaggtgtcctctgtgatgaagaggaggatctgtttaacccatgccaggcgatcaagtgcaagcacgggaagtgcaggctttcaggtctggggcagccctactgtgaatgcagcagtggatacacgggggacagctgtgatcgagaaatctcttgtcgaggggaaaggataagagattattaccaaaagcagcagggctatgctgcttgccaaacaaccaagaaggtgtcccgattagagtgcagaggtgggtgtgcaggagggcagtgctgtggaccgctgaggagcaagcggcggaaatactctttcgaatgcactgacggctcctcctttgtggacgaggttgagaaagtggtgaagtgcggctgtacgaggtgtgtgtcctaaacacactcccggcagctctgtctttggaaaaggttgtatacttcttgaccatgtgggactaatgaatgcttcatagtggaaatatttgaaatatattgtaaaatacagaacagacttatttttattatgagaataaagactttttttctgcatttg

SEQ ID NO: 60 - DNA, 5400 bp, Homo sapiens
ccgccaagcatattgctaggcacagagcaggtgtgcaacaaaagttatttctcaggctttccctcctctgagcgccgtcctccagagggtccggagtgtagctgggggttggagcagcagcctcctaggcgatgggacagagcccacagggtccggtatgccacggtttcttcgtcagaccctgggaatccaacgtcgcaaaataaacacggccgcgccgctaatcgccagttcggaggaaacaaaacagcgctgcgctgggggatctgggcaaaatcagccctccctcctcccgctccttcgccgcggccctcccctcctcgcgctgctctcgttcgcttggctcagctcagctcagctcagcgcagctccgcggccgccaagccgaggcgggcacggtctccgagtcgcggacgccagctccgagctccctctctccgccgcgcctccgccaggtcgcgccttcgtcgggaccacttcgggcaggagtcgcgtggcgaaggcctgcggccgcggcacaaagttgggggccgcgaagatgaggctgtccccggcgcccctgaagctgagccggactccggcactgctggccctggcgctgcccctggccgcggcgctggccttctccgacgagaccctggacaaagtgcccaagtcagagggctactgcagccgtatcctgcgcgcccagggcacgcggcgcgagggctacaccgagttcagcctccgcgtggagggcgaccccgacttctacaagccgggaaccagctaccgcgtaacactttcagctgctcctccctcctacttcagaggattcacattaattgccctcagagagaacagagagggtgataaggaagaagaccatgctgggaccttccagatcatagacgaagaagaaactcagtttatgagcaattgccctgttgcagtcactgaaagcactccacggaggaggacccggatccaggtgttttggatagcaccaccagcgggaacaggctgcgtgattctgaaggccagcatcgtacaaaaacgcattatttattttcaagatgagggctctctgaccaagaaactttgtgaacaagattccacatttgatggggtgactgacaaacccatcttagactgctgtgcctgcggaactgccaagtacagactcacattttatgggaattggtccgagaagacacacccaaaggattaccctcgtcgggccaaccactggtctgcgatcatcggaggatcccactccaagaattatgtactgtgggaatatggaggatatgccagcgaaggcgtcaaacaagttgcagaattgggctcacccgtgaaaatggaggaagaaattcgacaacagagtgatgaggtcctcaccgtcatcaaagccaaagcccaatggccagcctggcagcctctcaacgtgagagcagcaccttcagctgaattttccgtggacagaacgcgccatttaatgtccttcctgaccatgatgggccctagtcccgactggaacgtaggcttatctgcagaagatctgtgcaccaaggaatgtggctgggtccagaaggtggtgcaagacctgattccctgggacgctggcaccgacagcggggtgacctatgagtcacccaacaaacccaccattccccaggagaaaatccggcccctgaccagcctggaccatcctcagagtcctttctatgacccagagggtgggtccatcactcaagtagccagagttgtcatcgagagaatcgcacggaagggtgaacaatgcaatattgtacctgacaatgtcgatgatattgtagctgacctggctccagaagagaaagatgaagatgacacccctgaaacctgcatctactccaactggtccccatggtccgcctgcagctcctccacctgtgacaaaggcaagaggatgcgacagcgcatgctgaaagcacagctggacctcagcgtcccctgccctgacacccaggacttccagccctgcatgggccctggctgcagtgacgaagacggctccacctgcaccatgtccgagtggatcacctggtcgccctgcagcatctcctgcggcatgggcatgaggtcccgggagaggtatgtgaagcagttcccggaggacggctccgtgtgcacgctgcccactgaggaaacggagaagtgcacggtcaacgaggagtgctctcccagcagctgcctgatgaccgagtggggcgagtgggacgagtgcagcgccacctgcggcatgggcatgaagaagcggcaccgcatgatcaagatgaaccccgcagatggctccatgtgcaaagccgagacatcacaggcagagaagtgcatgatgccagagtgccacaccatcccatgcttgctgtccccatggtccgagtggagtgactgcagcgtgacctgcgggaagggcatgcgaacccgacagcggatgctcaagtctctggcagaacttggagactgcaatgaggatctggagcaggtggagaagtgcatgctccctgaatgccccattgactgtgagctcaccgagtggtcccagtggtcggaatgtaacaagtcatgtgggaaaggccacgtgattcgaacccggatgatccaaatggagcctcagtttggaggtgcaccctgcccagagactgtgcagcgaaaaaagtgccgcatccgaaaatgccttcgaaatccatccatccaaaagctacgctggagggaggcccgagagagccggcggagtgagcagctgaaggaagagtctgaaggggagcagttcccaggttgtaggatgcgcccatggacggcctggtcagaatgcaccaaactgtgcggaggtggaattcaggaacgttacatgactgtaaagaagagattcaaaagctcccagtttaccagctgcaaagacaagaaggagatcagagcatgcaatgttcatccttgttagcaagggtacgagttccccagggctgcactctagattccagagtcaccaatggctggattatttgcttgtttaagacaatttaaattgtgtacgctagttttcatttttgcagtgtggttcgcccagtagtcttgtggatgccagagacatcctttctgaatacttcttgatgggtacaggctgagtggggcgccctcacctccagccagcctcttcctgcagaggagtagtgtcagccaccttgtactaagctgaaacatgtccctctggagcttccacctggccagggaggacggagactttgacctactccacatggagaggcaaccatgtctggaagtgactatgcctgagtcccagggtgcggcaggtaggaaacattcacagatgaagacagcagattccccacattctcatctttggcctgttcaatgaaaccattgtttgcccatctcttcttagtggaactttaggtctcttttcaagtctcctcagtcatcaatagttcctggggaaaaacagagctggtagacttgaagaggagcattgatgttgggtggcttttgttctttcactgagaaattcggaatacatttgtctcacccctgatattggttcctgatgcccccccaacaaaaataaataaataaattatggctgctttatttaaatataaggtagctagtttttacacctgagataaataataagcttagagtgtatttttcccttgcttttgggggttcagaggagtatgtacaattcttctgggaagccagccttctgaactttttggtactaaatccttattggaaccaagacaaaggaagcaaaattggtctctttagagaccaatttgcctaaattttaaaatcttcctacacacatctagacgttcaagtttgcaaatcagtttttagcaagaaaacatttttgctatacaaacattttgctaagtctgcccaaagcccccccaatgcattccttcaacaaaatacaatctctgtactttaaagttattttagtcatgaaattttatatgcagagagaaaaagttaccgagacagaaaacaaatctaagggaaaggaatattatgggattaagctgagcaagcaattctggtggaaagtcaaacctgtcagtgctccacaccagggctgtggtcctcccagacatgcataggaatggccacaggtttacactgccttcccagcaattataagcacaccagattcagggagactgaccaccaagggatagtgtaaaaggacattttctcagttgggtccatcagcagtttttcttcctgcatttattgttgaaaactattgtttcatttcttcttttataggccttattactgcttaatccaaatgtgtaccattggtgagacacatacaatgctctgaatacactacgaatttgtattaaacacatcagaatatttccaaatacaacatagtatagtcctgaatatgtacttttaacacaagagagactattcaataaaaactcactgggtctttcatgtctttaagctaagtaagtgttcagaaggttcttttttatattgtcctccacctccatcattttcaataaaagatagggcttttgctcccttgttcttggagggaccattattacatctctgaactacctttgtatccaacatgttttaaatccttaaatgaattgctttctcccaaaaaaagcacaatataaagaaacacaagatttaattatttttctacttggggggaaaaaagtcctcatgtagaagcacccacttttgcaatgttgttctaagctatctatctaactctcagcccatgataaagttccttaagctggtgattcctaatcaaggacaagccaccctagtgtctcatgtttgtatttggtcccagttgggtacattttaaaatcctgattttggagacttaaaaccaggttaatggctaagaatgggtaacatgactcttgttggattgttattttttgtttgcaatggggaatttataagaagcatcaagtctctttcttaccaaagtcttgttaggtggtttatagttcttttggctaacaaatcattttggaaataaagattttttactacaaaaatgaaatttgtttggacttccacttgagacagtaaagagagtattagacacccagtaaaaactgccatataaagaagttgtaattgtttgttgtgtatgtatttttttcaatgccaaaccagctgtgatccaatttacatccacattttaggtccaacagcaagaagttcagagagagatttcccaaccagacattgggtcactcactggtcaccttgccagtgcattttattagaagggaatctgttgtagcaaatgggaataaacctgggtttctatagacccagaactgaaaaaataaaaaaaaaaaaaaaaaa

SEQ ID NO: 61 - DNA, 4934 bp, Homo sapiens
gcgagctgagctgacagcgcggagctggcgctgtggagcgcagggagccttgccggttcctccgaccggcgtctgcgagtacagcggcggctaacctgccccggcttcaggatttacacagacgtggggcgatgcttgtgaccctgcagctcctcaaaccagcctgtattgagcggtttgcagcctgatgctcagccccctccccacagggcccctagaagcctgtttctccgtacagtccaggacctccagccccatggagcccccgatcccacagagcgcccccttgactcccaactcagtcatggtccagccccttcttgacagccggatgtcccacagccggctccagcacccactcaccatcctacccattgaccaggtgaagaccagccatgtggagaatgactacatagacaaccctagcctggccctgaccaccggcccaaagcggacccggggcggggccccagagctggccccgacgcccgcccgctgtgaccaggatgtcacccaccattggatctccttcagcgggcgccccagctctgtgagcagcagcagcagcacatcctctgaccaacggctcttagaccacatggcaccaccacccgtggctgaccaggcctcaccaagggctgtgcgcatccagcccaaggtggtccactgccagccgctggacctcaagggcccggcggtcccacccgagctggacaagcacttcttgctgtgcgaggcctgtgggaagtgtaaatgcaaggagtgtgcatccccccggacgttgccttcctgctgggtctgcaaccaggagtgcctgtgctcagcccagactctggtcaactatggcacgtgcatgtgtttggtgcagggcatcttctaccactgcacgaatgaggacgatgagggctcctgcgctgaccacccctgctcctgctcccgctccaactgctgcgcccgctggtccttcatgggtgctctctccgtggtgctgccctgcctgctctgctacctgcctgccaccggctgcgtgaagctggcccagcgtggctacgaccgtctgcgccgccctggttgccgctgcaagcacacgaacagcgtcatctgcaaagcagccagcggggatgccaagaccagcaggcccgacaagcctttctgacagtttgtgtcgaagccccagtgctctgcctggaaacctggttctcttctgacatctaagaagactgcagcaaggtcagaggttttagcctcctgaggctgaccttgctagtctgcccactccctacccccagcttcggaaaatacagagaccaccaccacgtaccctgtattccccaaggtgatgaagaagcactttggggctttttttcagggtcctgaaactttgtgtcaaacagacaatgcaggggcagggtgtggtttggggggaaatttttctttttcagaagacagaacacagatgtggacacatatccggaaactgcagctgcttgaatgccttcccagcccctccttctccctccctccctccgccccccccttcctcttttccattgtctttggctctcacaggagctagctgcctgggaggaattgttaactgagtaccagggtacctttaaagaagacccttggagtcttctataccttcttctccttccccatctcactccaccccactttgtccctgatgtcttggggaaggtgtagaacaccctagcagttcctattgtatatacttgggagccactgagaacagaggacggccagtgagtccaagcctcgttcctccttctgcctccccggagccacaggatggatttaggagccactgctcagtgcacttctcccttccaactgcatcaactaactctcgggggtgttctgctcaccacaccgtccttcggttcttactgagtcacagactcgcctgcccactacgtgtcctgggttctctactcagatcccttccagaaactttatatgggtagaggaagccagggcggcaaatgcgagaccaaatatcattttgccaatgagtctgaggctgtggtctctggatccagtcattatgtttttatagaataattaaaccggatgctaacggtgttttaaaaaataataataaaacaacttgtttccttttggccacccccaggaagggctgatttcaaaatctgggggcgagcaacctcaaggaacacaatttccctccctatcaacaagaggattttaacagcaaagaagagaggcagcacctcccattggcagaatgaccgctgagccaggctgggtttgggtttcttctcttctgattctgctgctcactgtcatagccttttgtgtatagtgatgtgtctgtatctttaatgtaaatagagagatgatgaaaaaagagtctattttagtgttaggaagccccagcaggggagtcggaagagcttggaagagctggggagagggtaggggaaaggtttttccaggggccactgggtttgagccctgcttctgtgcacagccacaccaccctctcccgacagccctcaaagacgtagcaactctttctctcaaggtgctaaaggactcagaaggtgcagcacgtccagtgggtaggtacttgttgcatgcaaaagctgtagtgtatctggtccttcctccccagcttttgtgtggggttcttgctttgtgtggtattttgttttcccctctaatgagagggcatggcctgagtcagaagagctaccccaggtgaaactggaagtgcatgaggcagagcgtccgtagcatttccagtttgttctgtataggacagaggtgcctccgggaaggaggcagcgaggtaggtagctatgataggcacctaatgcttctcaaggacttattttttccttcttgaagactagtagtaacatcttatgatttagagtaagttgattgtaaccataggtatttattgattggaggaagggagggtcatattattttcggctttatttatgtaacatttgctagcttataaaaggcgaatgtgaaatattgcatctgcattttccaaggctgattcgtgtagctacccttgccacagttgtgacggatgtatggatgttcttgaacatttcagaaggagtggtagaaaaaaacacacattcagccaaccacttatatgaattgaatgtatcagaagtgtactgaagggactggagatggttttcctcagatgagggggccccaaaattgatagtgcacatctgcacgctttctgcgaggcctcagaacttttcccagggcccctccctcaaattgtctccatgggaaacttgacccagtggcaagttgcactttggtgatcttggtggtctacacacccgttctgtggagagtcgatttacataagctgtgtatacacacacacacacacacacacacacacacacacacacacccctaccccacactgactgtctaccgacagagaccctatttcctggcaaacggcctcctgaaccctgactttttgtgtacatacttgtaaacacggatttttctgggttttggtttgctttttccttttttccccctgcccctgttctagcttgttcttcttggtttgctttcaacctgcttgatggatgtctgcagagtgctctctaagagtccacctcagtgcctcgtgtgctcagtggtcatgggaaggagcgaaggaaccatccttggttctcccagcttggttgtgtagcaatccctcagcattgtttttctcagcttcttggcaaaaattaaaacaacaacaacaacaacaacaacaacaacaaacagaaggataaactggcttgcctgtggaccctccccggctctggggccagtcgagagccactgagggacccagcactcagagacacaacacacatgtgtagctgcttctggctgagtgtgtttcctgtcaccaatggcctgtttggctggacgatgcctcggcttgaccttttttgaaaagtgctggttagttcccgccccctggtaaacctggggtaggtgggggttctgtcttaactcgaggggcacctgggatccaggacgcttctagggggctctggctgcccgtgttaatgaaggacagcgcttccgcgagcaccctgggaactgggtcttgggtagcaaagccctcccagagaaaagatgggcacaactaaggctttcctgagcaggaagggggtgaagaccaatcccttcctttggtcctttggtacgcaccccctcagagctgagatggaagacatggctagttcttttcagccttgtggagcctgtcagtcgccatcatacctcgagtgaggcccagctagataatgacttgtccaagatggcacacgtggaaagttgatctgcaccagaacccggatgactgtcaccttgaagcgtcctgttctccttctgtgctgtcccaggaagtgtctggcgggcgtgggcagcacagctctacactgtacgattcactagggcatcctgcgagcctcactagccttctggttcatgcctttgacaagcatttttgtgccccctctgcttactgtgacagtcgatgatgaatcttgcgttgccattttctgctgtgggtaactgcgtgcagtgtcttgccttgctttctcttcttactgtcccacagcttggtttcatgttacaaacagaaaagctcgaggctcccaccccgccacatcccaacttcatttccccctcactgtagcccatttccaccccaccacaaagttgccacaggttttctttgtatagaatatttattttgaagctctattttaatagtatttattttagaaagtctactattgtaagagttcttctgtttgtgaagaaaaaaacaagttaaaaactgaatgtactgatttagaaaatatatataaatatatattgttaaatataaa

SEQ ID NO: 62 - DNA, 1947 bp, Homo sapiens
catccctgccattgccgggcactcgcggcgctgctaacggcctggtcacatgctctccggagagctacgggagggcgctgggtaacctctatccgagccgcggccgcgaggaggagggaaaaggcgagcaaaaaggaagagtgggaggaggaggggaagcggcgaaggaggaagaggaggaggaggaagaggggagcacaaaggatccaggtctcccgacgggaggttaataccaagaaccatgtgtgccgagcggctgggccagttcatgaccctggctttggtgttggccacctttgacccggcgcgggggaccgacgccaccaacccacccgagggtccccaagacaggagctcccagcagaaaggccgcctgtccctgcagaatacagcggagatccagcactgtttggtcaacgctggcgatgtggggtgtggcgtgtttgaatgtttcgagaacaactcttgtgagattcggggcttacatgggatttgcatgacttttctgcacaacgctggaaaatttgatgcccagggcaagtcattcatcaaagacgccttgaaatgtaaggcccacgctctgcggcacaggttcggctgcataagccggaagtgcccggccatcagggaaatggtgtcccagttgcagcgggaatgctacctcaagcacgacctgtgcgcggctgcccaggagaacacccgggtgatagtggagatgatccatttcaaggacttgctgctgcacgaaccctacgtggacctcgtgaacttgctgctgacctgtggggaggaggtgaaggaggccatcacccacagcgtgcaggttcagtgtgagcagaactggggaagcctgtgctccatcttgagcttctgcacctcggccatccagaagcctcccacggcgccccccgagcgccagccccaggtggacagaaccaagctctccagggcccaccacggggaagcaggacatcacctcccagagcccagcagtagggagactggccgaggtgccaagggtgagcgaggtagcaagagccacccaaacgcccatgcccgaggcagagtcgggggccttggggctcagggaccttccggaagcagcgagtgggaagacgaacagtctgagtattctgatatccggaggtgaaatgaaaggcctggccacgaaatctttcctccacgccgtccattttcttatctatggacattccaaaacatttaccattagagaggggggatgtcacacgcaggattctgtggggactgtggacttcatcgaggtgtgtgttcgcggaacggacaggtgagatggagacccctggggccgtggggtctcaggggtgcctggtgaattctgcacttacacgtactcaagggagcgcgcccgcgttatcctcgtacctttgtcttctttccatctgtggagtcagtgggtgtcggccgctctgttgtgggggaggtgaaccagggaggggcagggcaaggcagggcccccagagctgggccacacagtgggtgctgggcctcgccccgaagcttctggtgcagcagcctctggtgctgtctccgcggaagtcagggcggctggattccaggacaggagtgaatgtaaaaataaatatcgcttagaatgcaggagaagggtggagaggaggcaggggccgagggggtgcttggtgccaaactgaaattcagtttcttgtgtggggccttgcggttcagagctcttggcgagggtggagggaggagtgtcatttctatgtgtaatttctgagccattgtactgtctgggctgggggggacactgtccaagggagtggcccctatgagtttatattttaaccactgcttcaaatctcgatttcactttttttatttatccagttatatctacatatctgtcatctaaataaatggctttcaaacaaaaaaaaaaaaaaaaaa

SEQ ID NO: 63 - DNA, 3993 bp, Homo sapiens
agtcatcacaagcctgttcggcgggactgtgatggccagagagatgacgatcttaggatcggctgttttgactctcctgttggccggctatttggcacaacagtatttaccattgcctactcctaaagtgattggtattgatcttggcaccacctattgttctgttggggtgttttttcctggcacaggaaaagtaaaggtgattccagatgaaaatgggcatatcagcatacccagcatggtgtcttttactgacaatgatgtatatgtgggatatgaaagcgtagagctggcagattcaaatcctcaaaacacaatatatgatgccaaaagattcataggcaagatttttaccgcagaagagttggaggctgaaattggcagatacccatttaaggttttaaacaaaaatggaatggttgagttttctgtgacaagtaatgagaccatcacagtgtccccagaatatgttggctctcgactattgttgaagttaaaggaaatggcagaggcatatcttggaatgccagttgccaatgctgtcatttctgtaccagcagaatttgatctaaaacagagaaattcaacaattgaagctgctaaccttgcaggactgaagattttgagggtaataaatgaacccacagcagcagctatggcctatggtctccacaaggctgacgtcttccacgtcttggtgatagacttgggcggaggaactctagatgtgtctttactgaataaacaaggagggatgtttctaacccgagcaatgtctggaaacaataaacttggaggacaggacttcaatcagagattgcttcagtacttatataaacagatctatcaaacatatggcttcgtgccctctaggaaagaggaaatccacagattgagacaagctgtggaaatggtcaaattaaatctgactcttcatcaatctgctcagttgtcagtattactaacggtggaggagcaggacaggaaggaacctcacagtagtgacactgaactgccaaaagacaaactttcctcagcagatgaccatcgcgtgaacagtgggtttggacgtggcctttctgataagaaaagtggagaaagtcaggttttatttgaaacagaaatatcacggaaactctttgatacccttaatgaagacctctttcagaaaatactggtacccattcagcaagtattgaaagaaggccacctggaaaagactgagattgatgaggtggttttagttgggggctccactcgtattcctcggatccgtcaagtcattcaagagttctttggaaaagatcccaacacatctgtagaccctgacctagcagtagtaacgggagtggctatccaagcagggattgatggaggcttttggcctctccaagtcagtgctttagaaattcccaataagcatttacaaaaaaccaacttcaactgaattctgcagaaataatggttatttgtgaacttgtctgatgatctcttcccatttatcagattaccttttccacaaaagaaagtctctaaaatatcacagatttacctagagggcaacatttagatacaggaaaattttacatagtgttttgtcttaggattagacgtgaccagattgatcctgtttgattttggagagatcctattctaacaaatactctaaaatgataaaattgaggtacaactctcttaaaagagtatggataactatattttctggattctggaggttgataaccatatgcacttaacattatattctataaacattaagtagtgccagttatgagattcccagttcttactaaattgtattagcaggagctggtaattacttgtattatcacatgtaactaataatttgaactatacttgaaggaccgtgttgatgtcaggtatttacagtggttggaagatagcagtattattagcataagctgcatacgtaatattcagtaactgccatattatataacaaatttacattcacaaattcagtatcctgttaagtgtcatattcttgtaatctgcattctccaggagttttatgtgtttaatagatgaatttattttatttctaaaggtattcaaatgtttcagcaccatatagtagaaatacccaattatattctagttcctttatgtcctgtacatcattctctgcttggatttccattattctgtttggttagagaataaaatcggtaattgcatttgaagaatgtgttaatgtcataataaagccatgattgctatcttatttttgttatccaagacctttgcaaacattggcaaatagcatcaattacctactgtatttgtttctttgtttatattttcagtaagccctggggaatatagcatggaattgagctactaaatggttttggttccgttttacggagatttttcctcatatttagttttgaatgaggaaaatgtgctcaattataaaagctgtgttattgttttctattattatttttaaataatcacacttggactcttttcaaacattaggttagtttgtaatgaaagcaaaaaatttgtgaatactggaagtaacgtggaaatctaatgtggaagccattgtggcaaggtttctacaaatcggcatttggagcagagttgtttgtttttgttgtttgtttcctttaagaaaaaccacagggaccaagaaagaaaatataacagtttgatttctgtcatacccattgtatttgaagatatatggatacagattatatatatatatacatattttccttaatagaggaatgcttcgtattattcaaaaattatatcctgatcacctttttttgttttttattgtaaagtatctctgcttcatccattgctgaattcgataggatgttgaaatgctggtcaccaaaaaaggaaactgagcaaattcatttcaacaacatcaaaacttcagcttctcatagtaaaaagctgaatgttactaatatttttcatatctaaaaaagaattcttagcaatgaaattgctgttaaaacacaaatttcaatcaaatacttttgtgtatagaaaatatgtatagtaggtagatagaaaagtataaaatgtttgttgaagtatcttattttagaatgaatggagaaatgccaaagatgaatccttcactgcattatgaaaatatttcacatgttctcttggactttatataaatctgtaatagattttagaattgaaaaattctttgtgaaggtcttctaaaagtgttccaatttatctcaaaatctccatatataggatcagcttaaaacataaagaaaaccttgaatttctcaaatgtttgagatgttcaagacagtctcttaatccgttaatgcttttggaaacaattgacaaaatagggcaggcagctcatctcatgtcctgaagttggaatttaaataattcctatttgcaaattagaatgacagtgttggaatttggaggcagtagttgagcatattctctagtatatagctacacctttaataaaatgaaggaatgtcttcaatcatattttagtgggctatttataaatagtcttgaagtcaatttagtttatttatttaaaagataatgcatcctgaaagggatcatttatgaataacaatctgaagtcttttcataaaaaaaattaataaactttagttgtacatttagccagcgttatttgaagtatgtaacttttaaaatattaagtgtcttgtatgattagaatatgtgaatgagtaacttattttgtatcaggaatgttttggtactgtgttttcactcaaaccactgacttaacagatactgctgtgtataacatgtactaaatattacagttattgtgcataacagattgttcctcttatatttgtgtgtatacaggcaattcatgttttaatgtaaataaataccattttgcagtttgttttttaaaaaaaaaaaaaaaaaaaaaaaaaaaaaataaaaaaaaaaaaaaaa

SEQ ID NO: 64 - DNA, 1458 bp, Homo sapiens
ccttcggcgagcgagcaccttcgacgcggtccggggaccccctcgtcgctgtcctcccgacgcggacccgcgtgccccaggcctcgcgctgcccggccggctcctcgtgtcccactcccggcgcacgccctcccgcgagtcccgggcccctcccgcgcccctcttctcggcgcgcgcgcagcatggcgcccccgcaggtcctcgcgttcgggcttctgcttgccgcggcgacggcgacttttgccgcagctcaggaagaatgtgtctgtgaaaactacaagctggccgtaaactgctttgtgaataataatcgtcaatgccagtgtacttcagttggtgcacaaaatactgtcatttgctcaaagctggctgccaaatgtttggtgatgaaggcagaaatgaatggctcaaaacttgggagaagagcaaaacctgaaggggccctccagaacaatgatgggctttatgatcctgactgcgatgagagcgggctctttaaggccaagcagtgcaacggcacctccacgtgctggtgtgtgaacactgctggggtcagaagaacagacaaggacactgaaataacctgctctgagcgagtgagaacctactggatcatcattgaactaaaacacaaagcaagagaaaaaccttatgatagtaaaagtttgcggactgcacttcagaaggagatcacaacgcgttatcaactggatccaaaatttatcacgagtattttgtatgagaataatgttatcactattgatctggttcaaaattcttctcaaaaaactcagaatgatgtggacatagctgatgtggcttattattttgaaaaagatgttaaaggtgaatccttgtttcattctaagaaaatggacctgacagtaaatggggaacaactggatctggatcctggtcaaactttaatttattatgttgatgaaaaagcacctgaattctcaatgcagggtctaaaagctggtgttattgctgttattgtggttgtggtgatagcagttgttgctggaattgttgtgctggttatttccagaaagaagagaatggcaaagtatgagaaggctgagataaaggagatgggtgagatgcatagggaactcaatgcataactatataatttgaagattatagaagaagggaaatagcaaatggacacaaattacaaatgtgtgtgcgtgggacgaagacatctttgaaggtcatgagtttgttagtttaacatcatatatttgtaatagtgaaacctgtactcaaaatataagcagcttgaaactggctttaccaatcttgaaatttgaccacaagtgtcttatatatgcagatctaatgtaaaatccagaacttggactccatcgttaaaattatttatgtgtaacattcaaatgtgtgcattaaatatgcttccacagtaaaatctgaaaaactgaaaaaaaaaaaaaa

SEQ ID NO: 65 - DNA, 2136 bp, Homo sapiens
cccacgcgtccgccacctcccacccgcctcttggctcctctcctctaggccgtcgctttcgggttctctcatcgcttcgtcgttcgccaatgtttgaggagaaggccagcagtccttcagggaagatgggaggcgaggagaagccgattggtgctggtgaagagaagcaaaaggaaggaggcaaaaagaagaacaaagaaggatctggagatggaggtcgagctgagttgaatccttggcctgaatatatttacacacgtcttgagatgtataatatactaaaagcagaacatgattccattctggcagaaaaggcagaaaaagatagcaagccaattaaagtcactttgcctgatggtaaacaggttgatgcggaatcttggaaaactacaccatatcaaattgcctgtggaattagtcaaggcctggccgacaacaccgttattgctaaagtaaataatgttgtgtgggacctggaccgccctctggaagaagattgtaccttggagcttctcaagtttgaggatgaggaagctcaggcagtgtattggcactctagtgctcacataatgggtgaagccatggaaagagtctatggtggatgtttatgctacggtccgccaatagaaaatggattctattatgacatgtacctcgaagaagggggtgtgtctagcaatgatttctcttctctggaggctttgtgtaagaaaatcattaaagaaaaacaagcttttgaaagactggaagttaagaaagaaactttactggcaatgtttaagtacaacaagttcaaatgccggatattgaatgaaaaggtgaatactccaactaccacagtctatagatgtggccctttgatagatctctgccggggtcctcatgttagacacacgggcaaaattaaggctttaaaaatacacaaaaattcctccacgtactgggaaggcaaagcagatatggagactctccagagaatttatggcatttcattcccagatcctaaaatgttgaaagagtgggagaagttccaagaggaagctaaaaaccgagatcataggaaaattggcagggaccaagaactatatttctttcatgaactcagccctggaagttgcttttttctgccaaaaggagcctacatttataatgcacttattgaattcattaggagcgaatataggaaaagaggattccaggaggtagtcaccccaaacatcttcaacagccgactctggatgacctcgggccactggcagcactacagcgagaacatgttctcctttgaggtggagaaggagctgtttgccctgaaacccatgaactgcccaggacactgccttatgtttgatcatcggccaaggtcctggcgagaactgcctctgcggctagctgattttggggtacttcataggaacgagctgtctggagcactcacaggactcacccgggtacgaagattccaacaggatgatgctcacatattctgtgccatggagcagattgaagatgaaataaaaggttgtttggattttctacgtacggtatatagcgtatttggattttcttttaaactaaacctttctactcgcccagaaaaattccttggagatatcgaagtatgggatcaagctgagaaacaacttgaaaacagtctgaatgaatttggtgaaaagtgggagttaaactctggagatggagctttctatggcccaaagattgacatacagattaaagatgcgattgggcggtaccaccagtgtgcaaccatccagctggatttccagttgcccatcagatttaatcttacttatgtaagccatgatggtgatgataagaaaaggccagtgattgttcatcgagccatcttgggatcagtggaaagaatgattgctatcctcacagaaaactatgggggcaaatggcccttttggctgtcccctcgccaggtaatggtagttccagtgggaccaacctgtgatgaatatgcccaaaaggtacgacaacaattccacgatgccaaattcatggcagacattgatctggatccaggctgtacattgaataaaaagattcgaaatgcacagttagcacagtataacttcattttagttgttggtgaaaaaaaaaaaaaaa

SEQ ID NO: 66 - DNA, 3059 bp, Homo sapiens
cagagatcacgacaagatctaaccagtcgcgcgtggtccccggcgccggagcgggccagctcagcccggcccagcccggccccgcgcagagcccccgccgcccccgcgcacagagccgggtgccccttgcggtgcgccggacgggaagccccgaggagcagctgctgcgcccgccacccgggtcgtccgtccaccgcgcgcgccgccgcccgggccgggggtccgagccgcgcgcccccggccccggccccggcccccgggcgcctgggccggatgtcccgatgagagagccggcgctggcggccagcgccatggcttaccacccgttccacgcgccacggcccgccgacttccccatgtccgcctttctggcggcggcgcagccctccttcttcccggcactcgcgctgccgcccggcgcgctggccaagccgctgcccgacccgggcctggcgggggcggcggccgcggcggcggcggcggcagcagcggccgaggcggggctgcacgtctcggcactgggcccgcacccgcccgccgcgcatctgcgctccctcaagagcctggagcccgaggacgaggtggaggacgaccccaaggtgacgctggaggccaaggagctgtgggaccagttccacaagctaggcacggagatggtcatcaccaagtccgggaggcggatgttcccccccttcaaggtgcgagtcagcggcctggacaagaaggccaagtatatcctgctgatggacattgtagccgctgacgattgccgctataagttccacaactcgcgctggatggtggcgggcaaggccgaccctgagatgcccaaacgcatgtacatccacccagacagcccagccacgggggagcagtggatggctaagcctgtggccttccacaagctgaagctgaccaacaacatctctgacaagcacggcttcaccatcctaaactccatgcacaagtaccagccgcgcttccacatagtgcgagccaacgacatcctgaagctgccttacagcaccttccgcacctacgtgttcccggagaccgacttcatcgccgtcactgcctaccagaatgacaagatcacacagctgaagatcgacaacaacccgtttgccaagggcttccgggacaccgggaacggccggcgggagaaaaggaagcagctgacgctgccgtctctacgcttgtacgaggagcactgcaaacccgagcgcgatggcgcggagtcagacgcctcgtcgtgcgaccctccccccgcgcgggaaccacccacctccccgggcgcagcgcccagtccgctgcgcctgcaccgggcccgagctgaggagaagtcgtgcgccgcggacagcgacccggagcctgagcggttgagcgaggagcgtgcgggggcgccgctaggccgcagcccggctccagacagcgccagccccactcgcttgaccgaacccgagcgcgcccgggagcggcgtagtcccgagaggggcaaggagccggccgagagcggcggggacggcccgttcggcctgaggagcctggagaaggagcgcgccgaagctcggaggaaggacgaggggcgcaaggaggcggccgagggcaaggagcagggcctggcgccgctggtggtgcagacagacagtgcgtcccccctgggcgccggacacctgcccggcctggccttttccagccacttgcacgggcagcagttctttgggccgctgggagccggccagccgctcttcctgcaccctggacagttcaccatgggccctggcgccttctccgccatgggcatgggtcacctactggcctcggtggcaggcggcggcaacggcggaggtggcgggcctgggaccgccgcggggctggacgcaggcgggctgggtcccgcggccagcgcagcaagcaccgccgcgcccttcccgttccacctctcccagcacatgctggcatctcagggaattccaatgcccactttcggaggcctcttcccctacccctacacctacatggcagcagcagccgcagccgcctcggctttgcccgccactagtgctgcagctgccgccgccgcagccgccggctccctctcccggagtcccttcctgggcagtgcccggccccgactgcgtttcagcccctatcagatcccggtcaccatcccgcctagcactagcctcctcaccaccgggctggcctctgagggctccaaggccgctggtggaaacagccgggagcctagccccctgcccgagctggctctccgcaaagtaggggccccatcccgcggtgccctgtcgcccagtggctcggccaaggaggcggccaatgaactgcagagcatccagagactggtgagtgggctggagagccagcgagccctctccccaggccgggagtcgcccaagtgaggggctgcccagctgctcccctgccacgcaggccacccgggctgcctgcccctgctgcttgggacgtgtacagcacagaatgagtatttatttaaataaaggagaaaagtgggctgcagcagccggaatagagcctcgtctggcaagtcggggcctgggacacttccctgggcctcaacaaggatcaggctgctggaaacacagtcacttgggagctgctgggctaggtccagatccgctccagcgtcaaggtggcatccgaaggtgtctctggtcttccagcgaggtgggagaggcctcatccagggcccagcggtccctgcagaagccagaaggtgcaggggccaggggtgggagcatcggagggagtcccagagccctggaccttgggcctagaccgcgtgataaaactgggttgagggatgctggaaccagttacgactgaagtcagtgtagacctgagctgggagggaacctgttagtctccccacctcttccctgaagagacaggcacccctcccagccgtggtcaacggagggagtggcacttctgccttgagtccccaggggaaaaaaaaaaaaagatatttatgaaataaatggtaatttgtgtaaataagaaaaaaaaaaaaaaaaaaa

SEQ ID NO: 67 - DNA, 1791 bp, Homo sapiens
ggaggctgcagcagcggaagaccccagtccagatccaggactgagatcccagaaccatgaacctggccatcagcatcgctctcctgctaacagtcttgcaggtctcccgagggcagaaggtgaccagcctaacggcctgcctagtggaccagagccttcgtctggactgccgccatgagaataccagcagttcacccatccagtacgagttcagcctgacccgtgagacaaagaagcacgtgctctttggcactgtgggggtgcctgagcacacataccgctcccgaaccaacttcaccagcaaatacaacatgaaggtcctctacttatccgccttcactagcaaggacgagggcacctacacgtgtgcactccaccactctggccattccccacccatctcctcccagaacgtcacagtgctcagagacaaactggtcaagtgtgagggcatcagcctgctggctcagaacacctcgtggctgctgctgctcctgctctccctctccctcctccaggccacggatttcatgtccctgtgactggtggggcccatggaggagacaggaagcctcaagttccagtgcagagatcctacttctctgagtcagctgaccccctccccgcaatccctcaaaccttgaggagaagtggggaccccacccctcatcaggagttccagtgctgcatgcgattatctacccacgtccacgcggccacctcaccctctccgcacacctctggctgtctttttgtactttttgttccagagctgcttctgtctggtttatttaggttttatccttccttttctttgagagttcgtgaagagggaagccaggattggggacctgatggagagtgagagcatgtgaggggtagtgggatggtggggtaccagccactggaggggtcatccttgcccatcgggaccagaaacctgggagagacttggatgaggagtggttgggctgtgcctgggcctagcacggacatggtctgtcctgacagcactcctcggcaggcatggctggtgcctgaagaccccagatgtgagggcaccaccaagaatttgtggcctaccttgtgagggagagaactgagcatctccagcattctcagccacaaccaaaaaaaaataaaaagggcagccctccttaccactgtggaagtccctcagaggccttggggcatgacccagtgaagatgcaggtttgaccaggaaagcagcgctagtggagggttggagaaggaggtaaggatgagggttcatcatccctccctgcctaaggaagctaaaagcatggccctgctgcccctccctgcctccacccacagtggagagggctacaaaggaggacaagaccctctcaggctgtcccaagctcccaagagcttccagagctctgacccacagcctccaagtcaggtggggtggagtcccagagctgcacagggtttggcccaagtttctaagggaggcacttcctcccctcgcccatcagtgccagcccctgctggctggtgcctgagcccctcagacagccccctgccccgcaggcctgccttctcagggacttctgcggggcctgaggcaagccatggagtgagacccaggagccggacacttctcaggaaatggcttttcccaacccccagcccccacccggtggttcttcctgttctgtgactgtgtatagtgccaccacagcttatggcatctcattgaggacaaagaaaactgcacaataaaaccaagcctctggaatctaaaaaaaaaaaaaaaaaaaa

SEQ ID NO: 68 - DNA, 1440 bp, Homo sapiens
cagtcacatttcagccactgctctgagaatttgtgagcagcccctaacaggctgttacttcactacaactgacgatatgatcatcttaatttacttatttctcttgctatgggaagacactcaaggatggggattcaaggatggaatttttcataactccatatggcttgaacgagcagccggtgtgtaccacagagaagcacggtctggcaaatacaagctcacctacgcagaagctaaggcggtgtgtgaatttgaaggcggccatctcgcaacttacaagcagctagaggcagccagaaaaattggatttcatgtctgtgctgctggatggatggctaagggcagagttggataccccattgtgaagccagggcccaactgtggatttggaaaaactggcattattgattatggaatccgtctcaataggagtgaaagatgggatgcctattgctacaacccacacgcaaaggagtgtggtggcgtctttacagatccaaagcaaatttttaaatctccaggcttcccaaatgagtacgaagataaccaaatctgctactggcacattagactcaagtatggtcagcgtattcacctgagttttttagattttgaccttgaagatgacccaggttgcttggctgattatgttgaaatatatgacagttacgatgatgtccatggctttgtgggaagatactgtggagatgagcttccagatgacatcatcagtacaggaaatgtcatgaccttgaagtttctaagtgatgcttcagtgacagctggaggtttccaaatcaaatatgttgcaatggatcctgtatccaaatccagtcaaggaaaaaatacaagtactacttctactggaaataaaaactttttagctggaagatttagccacttataaaaaaaaaaaaaaggatgatcaaaacacacagtgtttatgttggaatcttttggaactcctttgatctcactgttattattaacatttatttattatttttctaaatgtgaaagcaatacataatttagggaaaattggaaaatataggaaactttaaacgagaaaatgaaacctctcataatcccactgcatagaaataacaagcgttaacattttcatatttttttctttcagtcatttttctatttgtggtatatgtatatatgtacctatatgtatttgcatttgaaattttggaatcctgctctatgtacagttttgtattatactttttaaatcttgaactttataaacattttctgaaatcattgattattctacaaaaacatgattttaaacagctgtaaaatattctatgatatgaatgttttatgcattatttaagcctgtctctattgttggaatttcaggtcattttcataaatattgttgcaataaatatccttgaacacaaaaaaaaaaaaaaaaaa

SEQ ID NO: 69 - DNA, 2806 bp, Homo sapiens
gccaccttgtctgtgagctccctgtgccccccatacggtgtgtcctgtgggttggggtgtgcggaagaaagggacagagactgaggatgtgcggtgtaagcagtgtgctcggggtaccttctcagatgtgccttctagtgtgatgaaatgcaaagcatacacagactgtctgagtcagaacctggtggtgatcaagccggggaccaaggagacagacaacgtctgtggcacactcccgtccttctccagctccacctcaccttcccctggcacagccatctttccacgccctgagcacatggaaacccatgaagtcccttcctccacttatgttcccaaaggcatgaactcaacagaatccaactcttctgcctctgttagaccaaaggtactgagtagcatccaggaagggacagtccctgacaacacaagctcagcaagggggaaggaagacgtgaacaagaccctcccaaaccttcaggtagtcaaccaccagcaaggcccccaccacagacacatcctgaagctgctgccgtccatggaggccactgggggcgagaagtccagcacgcccatcaagggccccaagaggggacatcctagacagaacctacacaagcattttgacatcaatgagcatttgccctggatgattgtgcttttcctgctgctggtgcttgtggtgattgtggtgtgcagtatccggaaaagctcgaggactctgaaaaaggggccccggcaggatcccagtgccattgtggaaaaggcagggctgaagaaatccatgactccaacccagaaccgggagaaatggatctactactgcaatggccatggtatcgatatcctgaagcttgtagcagcccaagtgggaagccagtggaaagatatctatcagtttctttgcaatgccagtgagagggaggttgctgctttctccaatgggtacacagccgaccacgagcgggcctacgcagctctgcagcactggaccatccggggccccgaggccagcctcgcccagctaattagcgccctgcgccagcaccggagaaacgatgttgtggagaagattcgtgggctgatggaagacaccacccagctggaaactgacaaactagctctcccgatgagccccagcccgcttagcccgagccccatccccagccccaacgcgaaacttgagaattccgctctcctgacggtggagccttccccacaggacaagaacaagggcttcttcgtggatgagtcggagccccttctccgctgtgactctacatccagcggctcctccgcgctgagcaggaacggttcctttattaccaaagaaaagaaggacacagtgttgcggcaggtacgcctggacccctgtgacttgcagcctatctttgatgacatgctccactttctaaatcctgaggagctgcgggtgattgaagagattccccaggctgaggacaaactagaccggctattcgaaattattggagtcaagagccaggaagccagccagaccctcctggactctgtttatagccatcttcctgacctgctgtagaacatagggatactgcattctggaaattactcaatttagtggcagggtggttttttaattttcttctgtttctgatttttgttgtttggggtgtgtgtgtgtgtttgtgtgtgtgtgtgtgtgtgtgtgtgtgtgtgtttaacagagaatatggccagtgcttgagttctttctccttctctctctctcttttttttttaaataactcttctgggaagttggtttataagcctttgccaggtgtaactgttgtgaaatacccaccactaaagttttttaagttccatattttctccattttgccttcttatgtattttcaagattattctgtgcactttaaatttacttaacttaccataaatgcagtgtgacttttcccacacactggattgtgaggctcttaacttcttaaaagtataatggcatcttgtgaatcctataagcagtctttatgtctcttaacattcacacctactttttaaaaacaaatattattactatttttattattgtttgtcctttataaattttcttaaagattaagaaaatttaagaccccattgagttactgtaatgcaattcaactttgagttatcttttaaatatgtcttgtatagttcatattcatggctgaaacttgaccacactattgctgattgtatggttttcacctggacaccgtgtagaatgcttgattacttgtactcttcttatgctaatatgctctgggctggagaaatgaaatcctcaagccatcaggatttgctatttaagtggcttgacaactgggccaccaaagaacttgaacttcaccttttaggatttgagctgttctggaacacattgctgcactttggaaagtcaaaatcaagtgccagtggcgccctttccatagagaatttgcccagctttgctttaaaagatgtcttgttttttatatacacataatcaataggtccaatctgctctcaaggccttggtcctggtgggattccttcaccaattactttaattaaaaatggctgcaactgtaagaacccttgtctgatatatttgcaactatgctcccatttacaaatgtaccttctaatgctcagttgccaggttccaatgcaaaggtggcgtggactccctttgtgtgggtggggtttgtgggtagtggtgaaggaccgatatcagaaaaatgccttcaagtgtactaatttattaataaacattaggtgtttgttaaaaaaaaaaaaaaa

SEQ ID NO: 70 - DNA, 1399 bp, Homo sapiens
tgagattcacctcgcaagtggttccctcattcgagtgctccggcgcacagacccgcgccccgccgtccgcgagcctcccgagagccgtcccttcgtccggccctggagcattgcgtttgtcgccggtgtcgcagtgcgaggatggcgccgcgggtgtagcggctctctgcgcaggccgagtgggcccagagaagcgaggaactccgcagctcgtcgacacgtctcgtctcctgtcccaattcagggcttggtgaggtgactcgcggtcgcgggtgactcgccggcaggacactgcctggaacgcctggagcgcctcccactgcagacgtctgtccgtctccagccgctctcctctgacgggtcctgcctcagttggcggaatggcggccacgggagccaatgcagagaaagctgaaagtcacaatgattgccccgtcagacttttaaatccaaacatagcaaaaatgaaagaagatattctctatcatttcaatctcaccactagcagacacaatttcccagccttgtttggagatgtgaagtttgtgtgtgttggtggaagcccctcccggatgaaagccttcatcaggtgcgttggtgcagagctgggccttgactgcccaggtagagactatcccaacatctgtgcgggaactgaccgctatgccatgtataaagtaggaccggtgctgtctgtcagtcatggtatgggcattccttctatctcaatcatgttgcatgagctcataaagctgctgtactatgcccggtgctccaacgtcactatcatccgcattggcacttctggtgggataggtctggagcccggcactgtggtcataacagagcaggcagtggatacctgcttcaaggcagagtttgagcagattgtcctggggaagcgggtcatccggaaaacggaccttaacaagaagctggtgcaggagctgttgctgtgttctgcagagctgagcgagttcaccacagtggtggggaacaccatgtgcaccttggacttctatgaagggcaaggccgtctggatggggctctctgctcctacacggagaaggacaagcaggcgtatctggaggcagcctatgcagccggcgtccgcaatatcgagatggagtcctcggtgtttgccgccatgtgcagcgcctgcggcctccaagcggccgtggtgtgtgtcaccctcctgaaccgcctggaaggggaccagatcagcagccctcgcaatgtgctcagcgagtaccagcagaggccgcagcggctggtgagctacttcatcaagaagaaactgagcaaggcctgagcgctgccctgcacctccgcagacctgctgtgatgacttgccattaaaagcattgtccaaaaaaaaaaaaaaaaaaaaaaaaaaaa

SEQ ID NO: 71 - DNA, 24 bp, Artificial
  chemically synthesized
tggaagaggcacgttcttttcttt

SEQ ID NO: 72 - DNA, 23 bp, Artificial
  chemically synthesized
caggtgcagctggtgcagtctgg

SEQ ID NO: 73 - DNA, 23 bp, Artificial
  chemically synthesized
caggtcaacttaagggagtctgg

SEQ ID NO: 74 - DNA, 23 bp, Artificial
  chemically synthesized
gaggtgcagctggtggagtctgg

SEQ ID NO: 75 - DNA, 23 bp, Artificial
  chemically synthesized
caggtgcagctgcaggagtcggg

SEQ ID NO: 76 - DNA, 23 bp, Artificial
  chemically sythesized
caggtacagctgcagcagtcagg

SEQ ID NO: 77 - DNA, 51 bp, Artificial
  chemically synthesized
gtcctcgcaactgcggcccagccggccatggcccaggtcaacttaagggag

SEQ ID NO: 78 - DNA, 51 bp, Artificial
  chemically synthesized
gtcctcgcaactgcggcccagccggccatggccgaggtgcagctggtggag

SEQ ID NO: 79 - DNA, 51 bp, Artificial
  chemically synthesized
gtcctcgcaactgcggcccagccggccatggcccaggtgcagctgcaggag

SEQ ID NO: 80 - DNA, 51 bp, Artificial
  chemically synthesized
gtcctcgcaactgcggcccagccggccatggcccaggtgcagctgttgcag

SEQ ID NO: 81 - DNA, 51 bp, Artificial
  chemically synthesized
gtcctcgcaactgcggcccagccggccatggcccaggtacagctgcagcag

SEQ ID NO: 82 - DNA, 48 bp, Artificial
  chemically synthesized
gagtcattctcgacttgcggccgctggaagaggcacgttcttttcttt

SEQ ID NO: 83 - DNA, 23 bp, Artificial
  chemically synthesized
gatctgatctggggcctcggtgc

SEQ ID NO: 84 - DNA, 27 bp, Artificial
  chemically synthesized
gcaagcccaataggaacccatgtaccg

SEQ ID NO: 85 - DNA, 2056 bp, Homo sapiens
agtttcataatttccgtgggtcgggccgggcgggccaggcgctgggcacggtgatggccaccactggggccctgggcaactactacgtggactcgttcctgctgggcgccgacgccgcggatgagctgagcgttggccgctatgcgccggggaccctgggccagcctccccggcaggcggcgacgctggccgagcaccccgacttcagcccgtgcagcttccagtccaaggcgacggtgtttggcgcctcgtggaacccagtgcacgcggcgggcgccaacgctgtacccgctgcggtgtaccaccaccatcaccaccacccctacgtgcacccccaggcgcccgtggcggcggcggcgccggacggcaggtacatgcgctcctggctggagcccacgcccggtgcgctctccttcgcgggcttgccctccagccggccttatggcattaaacctgaaccgctgtcggccagaaggggtgactgtcccacgcttgacactcacactttgtccctgactgactatgcttgtggttctcctccagttgatagagaaaaacaacccagcgaaggcgccttctctgaaaacaatgctgagaatgagagcggcggagacaagccccccatcgatcccaataacccagcagccaactggcttcatgcgcgctccactcggaaaaagcggtgcccctatacaaaacaccagaccctggaactggagaaagagtttctgttcaacatgtacctcaccagggaccgcaggtacgaggtggctcgactgctcaacctcaccgagaggcaggtcaagatctggttccagaaccgcaggatgaaaatgaagaaaatcaacaaagaccgagcaaaagacgagtgatgccatttgggcttatttagaaaaaagggtaagctagagagaaaaagaaagaactgtccgtcccccttccgccttctcccttttctcacccccaccctagcctccaccatccccgcacaaagcggctctaaacctcaggccacatcttttccaaggcaaaccctgttcaggctggctcgtaggcctgccgctttgatggaggaggtattgtaagctttccattttctataagaaaaaggaaaagttgaggggggggcattagtgctgatagctgtgtgtgttagcttgtatatatatttttaaaaatctacctgttcctgacttaaaacaaaaggaaagaaactacctttttataatgcacaactgttgatggtaggctgtatagtttttagtctgtgtagttaatttaatttgcagtttgtgcggcagattgctctgccaagatacttgaacactgtgttttattgtggtaattatgttttgtgattcaaacttctgtgtactgggtgatgcacccattgtgattgtggaagatagaattcaatttgaactcaggttgtttatgaggggaaaaaaacagttgcatagagtatagctctgtagtggaatatgtcttctgtataactaggctgttaacctatgattgtaaagtagctgtaagaatttcccagtgaaataaaaaaaaattttaagtgttctcggggatgcatagattcatcattttctccaccttaaaaatgcgggcatttaagtctgtccattatctatatagtcctgtcttgtctattgtatatataatctatatgattaaagaaaatatgcataatcagacaagcttgaatattgtttttgcaccagacgaacagtgaggaaattcggagctatacatatgtgcagaaggttactacctagggtttatgcttaattttaatcggaggaaatgaatgctgattgtaacggagttaattttattgataataaattatacactatgaaaccgccattgggctactgtagatttgtatccttgatgaatctggggtttccatcagactgaacttacactgtatattttgcaatagttacctcaaggcctactgaccaaattgttgtgttgagatgatatttaactttttgccaaataaaatatattgattcttttctaaaaaaaaaaaaaaaaaaaa

SEQ ID NO: 86 - DNA, 625 bp, Homo sapiens
agagtcactcctgccttcaccatgaagtccagcggcctcttccccttcctggtgctgcttgccctgggaactctggcaccttgggctgtggaaggctctggaaagtccttcaaagctggagtctgtcctcctaagaaatctgcccagtgccttagatacaagaaacctgagtgccagagtgactggcagtgtccagggaagaagagatgttgtcctgacacttgtggcatcaaatgcctggatcctgttgacaccccaaacccaacaaggaggaagcctgggaagtgcccagtgacttatggccaatgtttgatgcttaacccccccaatttctgtgagatggatggccagtgcaagcgtgacttgaagtgttgcatgggcatgtgtgggaaatcctgcgtttcccctgtgaaagcttgattcctgccatatggaggaggctctggagtcctgctctgtgtggtccaggtcctttccaccctgagacttggctccaccactgatatcctcctttggggaaaggcttggcacacagcaggctttcaagaagtgccagttgatcaatgaataaataaacgagcctatttctctttgcaaaaaaaaaaaaaaaaaaaaaaaaaaaaaa

SEQ ID NO: 87 - DNA, 1211 bp, Homo sapiens
caaccttctcagctacaaatacttgaagaaacagagcagggagctcaagccagtgggagtcatggcccctgcctcagggcctgccagcacggacgctgtgtctgctctgttggaacagacagcagtggagctggagaagaggcaggagggcaggagcagcacacagacactggaagacagctggaggtatgaggagaccagtgagaatgaggcagtagccgaggaagaggaggaggaggtggaggaggaggagggagaagaggatgttttcaccgagaaagcctcacctgatatggatgggtacccagcattaaaggtggacaaagagaccaacacggagaccccggccccatcccccacagtggtgcgacctaaggaccggagagtgggcaccccgtcccaggggccatttcttcgagggagcaccatcatccgctctaagaccttctccccaggaccccagagccagtacgtgtgccggctgaatcggagtgatagtgacagctccactctgtccaaaaagccaccttttgttcgaaactccctggagcgacgcagcgtccggatgaagcggccttcctcggtcaagtcgctgcgctccgagcgtctgatccgtacctcgctggacctggagttagacctgcaggcgacaagaacctggcacagccaattgacccaggagatctcggtgctgaaggagctcaaggagcagctggaacaagccaagagccacggggagaaggagctgccacagtggttgcgtgaggacgagcgtttccgcctgctgctgaggatgctggagaagcggcagatggaccgagcggagcacaagggtgagcttcagacagacaagatgatgagggcagctgccaaggatgtgcacaggctccgaggccagagctgtaaggaacccccagaagttcagtctttcagggagaagatggcatttttcacccggcctcggatgaatatcccagctctctctgcagatgacgtctaatcgccagaaaagtatttcctttgttccactgaccaggctgtgaacattgactgtggctaaagttatttatgtggtgttatatgaaggtactgagtcacaagtcctctagtgctcttgttggtttgaagatgaaccgactttttagtttgggtcctactgttgttattaaaaaaaaaaaaaaaacaaaaaaaaaaaaaaaaaaaaaaaaaaa

SEQ ID NO: 88 - protein, 18 aa, Homo sapiens
CPGAKALSRVREDIVEDE

SEQ ID NO: 89 - DNA, 1108 bp, Homo sapiens
gagtgagtgagagggcagaggaaatactcaatctgtgccactcactgccttgagcctgcttcctcactccaggactgccagaggctcactcccttgagcctgcttcctcactccaggactgccagaggaagcaatcaccaaaatgaagactgctttaattttgctcagcattttgggaatggcctgtgctttctcaatgaaaaatttgcatcgaagagtcaaaatagaggattctgaagaaaatggggtctttaagtacaggccacgatattatctttacaagcatgcctacttttatcctcatttaaaacgatttccagttcagggcagtagtgactcatccgaagaaaatggagatgacagttcagaagaggaggaggaagaagaggagacttcaaatgaaggagaaaacaatgaagaatcgaatgaagatgaagactctgaggctgagaataccacactttctgctacaacactgggctatggagaggacgccacgcctggcacagggtatacagggttagctgcaatccagcttcccaagaaggctggggatataacaaacaaagctacaaaagagaaggaaagtgatgaagaagaagaggaggaagaggaaggaaatgaaaacgaagaaagcgaagcagaagtggatgaaaacgaacaaggcataaacggcaccagtaccaacagcacagaggcagaaaacggcaacggcagcagcggaggagacaatggagaagaaggggaagaagaaagtgtcactggagccaatgcagaaggcaccacagagaccggagggcagggcaagggcacctcgaagacaacaacctctccaaatggtgggtttgaacctacaaccccaccacaagtctatagaaccacttccccaccttttgggaaaaccaccaccgttgaatacgagggggagtacgaatacacgggcgtcaatgaatacgacaatggatatgaaatctatgaaagtgagaacggggaacctcgtggggacaattaccgagcctatgaagatgagtacagctactttaaaggacaaggctacgatggctatgatggtcagaattactaccaccaccagtgaagctccagcctg

SEQ ID NO: 90 - DNA, 6894 bp, Homo sapiens
tgacccggtccgtgtgggccagcgggaaggaagccagttgagggaagttctccatgaatgtacgtcacaatgatgatgaccgaccaaatccctctggaactgccaccattgctgaacggagaggtagccatgatgccccacttggtgaatggagatgcagctcagcaggttattctcgttcaagttaatccaggtgagactttcacaataagagcagaggatggaacacttcagtgcattcaaggacctgctgaagttcccatgatgtcacccaatggatccattcctcccattcatgtgcctccaggttatatctcacaggtgattgaagatagtactggagtccgccgggtggtggtcacaccccagtctcctgagtgttatcccccaagctacccctcagccatgtctccaacccatcatctccctccctatctgactcaccatccacattttattcataactcacacacggcttactacccacctgttaccggacctggagatatgccgcctcagttttttccccagcatcatcttccccacacaatatatggtgagcaagaaattataccattttatggaatgtcaagctacatcacccgagaagaccagtacagcaagcctccgcacaaaaaactgaaagaccgccagatcgatcgccagaaccgactcaacagacctccttctgctatctacaaaagcagctgcacaacagtatacaatggctatgggaagggccatagtggtggaagtggcggaggcggcagcggtagtggtcccggaattaagaaaacagagcgacgagcaagaagcagcccaaagtcgaatgattcagacttgcaagaatatgagttggaagtaaagagggtgcaagacattctttcgggaatagagaaaccacaggtttctaatattcaggcaagagcagttgtgttgtcctgggctccccctgttggactttcctgtggaccccacagtggtctttccttcccctacagttacgaggtggccttatcagacaaaggacgagatggaaaatacaagataatttacagtggagaagaattagaatgtaacctgaaagatcttagaccagcaacagattatcatgtgagggtgtatgccatgtacaattccgtaaagggatcctgctccgagcctgttagcttcaccacccacagctgtgcacccgagtgtcctttcccccctaagctggcacataggagcaaaagttcactaaccctgcagtggaaggcaccaattgacaacggttcaaaaatcaccaactaccttttagagtgggatgagggaaaaagaaatagtggtttcagacagtgcttcttcgggagccagaagcactgcaagttgacaaagctttgtccggcaatggggtacacattcaggctggccgctcgaaacgacattggtaccagtggttatagccaagaggtggtgtgctacacattaggaaatatccctcagatgccttctgcaccaaggctggttcgagctggcatcacatgggtcacgttgcagtggagtaagccagaaggctgttcacccgaggaagtgatcacctacaccttggaaattcaggaggatgaaaatgataaccttttccacccaaaatacactggagaggatttaacctgtactgtgaaaaatctcaaaagaagcacacagtatacattcaggctgactgcttctaatacggaaggaaaaagctgtccaagcgaagttcttgtttgtacgacgagtcctgacaggcctggacctcctaccagaccgcttgtcaaaggcccagttacatctcatggctttagtgtcaaatgggatccccctaaggacaatggtggttcagaaatcctcaagtacttgctagagattactgatggaaattctgaagcgaatcagtgggaagtggcctacagtgggtcggctaccgaatacaccttcacccacttgaaaccaggcactttgtacaaactccgagcatgctgcatcagtaccggcggacacagccagtgttctgaaagtctccctgttcgcacactaagcattgcaccaggtcaatgtcgaccaccgagggttttgggtagaccaaagcacaaagaagtccacttagagtgggatgttcctgcatcggaaagtggctgtgaggtctcagagtacagcgtggagatgacggagcccgaagacgtagcctcggaagtgtaccatggcccagagctggagtgcaccgtcggcaacctgcttcctggaaccgtgtatcgcttccgggtgagggctctgaatgatggagggtatggtccctattctgatgtctcagaaattaccactgctgcagggcctcctggacaatgcaaagcaccttgtatttcttgtacacctgatggatgtgtcttagtgggttgggagagtcctgatagttctggtgctgacatctcagagtacaggttggaatggggagaagatgaagaatccttagaactcatttatcatgggacagacacccgttttgaaataagagacctgttgcctgctgcacagtattgctgtagactacaggccttcaatcaagcaggggcagggccgtacagtgaacttgtcctttgccagacgccagcgtctgcccctgaccccgtctccactctctgtgtcctggaggaggagccccttgatgcctaccctgattcaccttctgcgtgccttgtactgaactgggaagagccgtgcaataacggatctgaaatccttgcttacaccattgatctaggagacactagcattaccgtgggcaacaccaccatgcatgttatgaaagatctccttccagaaaccacctaccggatcagaattcaggctataaatgaaattggagctggaccatttagtcagttcattaaagcaaaaactcggccattaccacccttgcctcctaggctagaatgtgctgctgctggtcctcagagcctgaagctaaaatggggagacagtaactccaagacacatgctgctgaggacattgtgtacacactacagctggaggacagaaacaagaggtttatttcaatctacagaggacccagccacacctacaaggtccagagactgacggaattcacatgctactccttcagaatccaggcagcaagcgaggctggagaagggcccttctcagaaacctataccttcagcacaaccaaaagtgtcccccccaccatcaaagcacctcgagtaacacagttagaaggaaattcatgtgaaattttatgggagacggtaccatcaatgaaaggtgaccctgttaactacattctgcaggtattggttggaagagaatctgagtacaaacaggtgtacaagggagaagaagccacattccaaatctcaggcctccagaccaacacagactacaggttccgcgtatgtgcgtgtcgtcgctgtttagacacctctcaggagctaagcggagccttcagcccctctgcggcttttgtattacaacgaagtgaggtcatgcttacaggggacatggggagcttagatgatcccaaaatgaagagcatgatgcctactgatgaacagtttgcagccatcattgtgcttggctttgcaactttgtccattttatttgcctttatattacagtacttcttaatgaagtaaacccaacaaaactagaggtatgaattaatgctacacattttaatacacacatttattcagatactcccctttttaaagcccttttgttttttgatttatatactctgttttacagatttagctagaaaaaaaatgtcagtgttttggtgcacctttttgaaatgcaaaactaggaaaaggttaaactggatttttttttttaaaaaaaagaaaaaaaaagaagaaaagtataccagataccaaaagctagctttcttatgttttcctttaaattttcagatttaccttcattctgttttcactgatgtcttttgcaagcctttgatttttttttttttgttacagtttagtaatttatattcaccagtcacttcatatgtcttgaacatctgtatctgtaaacatgaatcaccgtgtgtgtacttacagggctaggatttcagtgttgtcagagtattaccacacagcaacagcaacatacagaagatatgttcactcagataagactgccctaaacaaccattttgtcactcagttatttaactgtgtttagctcatttaaatcaaaatgtgtactttaatctaaaatgttttaataatctgtatttcttataattttaacactatgagctgcctgtataagaaatcaagtaaccagaatgcacctataaattatggagcattgtagattttaccacatcaattcatagcagtaactttaagagggcattgtgcaatagttagttgttttcttgttcagctattttaaaggctgctttaacttgtttgtttgtctttgtatataactacttctaatctaatcactagagttattatattctgttatgtttgaccagaattatatgacaagaactggtgacagtttagtgcctctgcccattgtccatgatttacactaattgtgagcagtcttcttatgtgtcagctcattatttttgaaacatttgcctttaggctgttctttgaggtatcaatgaagtgattgaatttcaataccttaattcagtgcacataatactaatgtaacagcagatgaaaattgataaaacccaaaagagagtcatctaaatttgtagttcctatttctgtgggtttgcctggccatggttggagagggaatggtgtttgatggtaaacacagggtgtttggggatcaaggagcctagattctctccctggatctgtcactaacttgctgcgtgacctgaacacgtcactttacctctctgtgcctcagttttcccatgcatgaaaaataaaataaaataaaacggggattctaatgtttgtaagtgctttgagatctttgaccaacaggtgctattggagtgcaaagtgttactcttacgtgtttattttgagtcatgagataatcaattttaacccaaagtcattggattatttatatgaagtccataatgttcgagtacctcagggacatttaagagttggaggtgcaaatatattccaaaagggtgcaacagacacagtgtatccccctgcttctgtttttgtatatttttgctacttggtttttcttgatcatagctattttgtgcttgatctttattgtctaagatgcagtatcctgtactagcttataatattcccataccaaagtcatggggaaacaaacattattttgtttttggtttatttatactatattctgcatacagtactttaaatgccaattacagtgcaatctttatttattgtaaaattttttaagtgtacttatgtactaattttcccttgtagcatgttatatttttgtgttttatacttttgtaattttaggtcagtcttgttccttggcaacatctgtagtattattaatcttctgacattttcttatgtttttaaaaagataagagcatctagtgcattaaatgccaaaaaaaaaatacattatcagtgattgaaacgtttacatgtacccaaaaaccataatcatctcttggaagaaaatgctgagatcaatgaattattctgtgtgcctatattgacgtagtgagtactagagagttctgtattttattattgactataataattagtttaattagctttgcaaactgatggcatcaaggtaaatatatttttgccaaagttctggccttccaaaactcacccccttatttaaatgtgtgctatgacccactatgaccacagcatctgcattttctaaaaaattccatgcaggtgttttggggagaggtattttttaagcaatgaaaattcaactgagtacaaagccccctcttggggggttggggaagtctcttttttgaaacacttcagaactgctgctataaagaaattctctaattggttgaattttttttttaagtaaatagtactttaggccaaaatttatatgaatatttgatcttcttgagattttcatactatcatttaaccaccaggaagctgaagtgtgtgaagtacaaagctgacagcactttattttattgctctccattatttggtattcattatattccttcagtcagaaaattattactctctatggcactgttttttatcacaaatatgtatatgtgatattgatatataactatatatattgccatcacacacgaacaataaaataaagtgttctattaacctgatctctttgcccttttgctatgtgaggagtgaatgagtggccttctgatgctctgactcttctctgtatgtcaaactcatccctggcacaagaaattccagtcatgtgaagcaaactgccctttgtcctcaaagaaattgttgaaaaagaaaactttttaaagagattttttgcatattctctgccttgttcttatcaacttgaaatgttggcattttctaaccttgttttgttggctacaataattcagtattcatgtcaaaattgagaagtgccctaattgaatgtgtttgaatgttatccttgcacaattctttaaattgaaagataaaatgttttacctcactgttggacatacattccaagcttttcaactctaggagaaaaagaaaatcatgttttcctgtattgtaaattttagactatttcatatacattgtattaaaactgccatatcaattttaatgtatagattttgcaaatattatgctatatgtaatacctaactgtatctgtagtgtatatgtaatatatttatgcccaataaatgttttaattctttctga

SEQ ID NO: 91 - DNA, 2365 bp, Homo sapiens
gagttgccgagcgcgccccgtccctcgcgcgcgatgctcccctggacggcgctcggcctggccctgagcttgcggctggcgctggcgcggagcggcgcggagcgcggtccaccagcatcagccccccgaggggacctgatgttcctgctggacagctcagccagcgtctctcactacgagttctcccgggttcgggagtttgtggggcagctggtggctccactgcccctgggcaccggggccctgcgtgccagtctggtgcacgtgggcagtcggccatacaccgagttccccttcggccagcacagctcgggtgaggctgcccaggatgcggtgcgtgcttctgcccagcgcatgggtgacacccacactggcctggcgctggtctatgccaaggaacagctgtttgctgaagcatcaggtgcccggccaggggtgcccaaagtgctggtgtgggtgacagatggcggctccagcgaccctgtgggcccccccatgcaggagctcaaggacctgggcgtcaccgtgttcattgtcagcaccggccgaggcaacttcctggagctgtcagccgctgcctcagcccctgccgagaagcacctgcactttgtggacgtggatgacctgcacatcattgtccaagagctgaggggctccattctcgacgcgatgcggccgcagcagctccatgccacggagatcacgtccagcggcttccgcctggcctggccacccctgctgaccgcagactcgggctactatgtgctggagctggtgcccagcgcccagccgggggctgcaagacgccagcagctgccagggaacgccacggactggatctgggccggcctcgacccggacacggactacgacgtggcgctagtgcctgagtccaacgtgcgcctcctgaggccccagatcctgcgggtgcgcacgcggcccggtgaggcagggccgggggcttcgggcccggagtcgggggctgggccggcccccacgcagctcgccgccctccccgccccagaggaggccgggccagagcgcatcgtcatctcccacgcccggccgcgcagcctccgcgtgagttgggccccagcgctgggctcagccgcggcgctcggctaccacgtgcagttcgggccgctgcggggcggggaggcgcagcgggtggaggtgcccgcgggccgcaactgcaccacgctgcagggcctggcgccgggcaccgcctacctggtgaccgtgaccgccgccttccgctcgggccgcgagagcgcgctgtccgccaaggcctgcacgcccgacggcccgcgcccgcgcccacgccccgtgccccgcgccccgaccccggggaccgccagccgtgagccgtaagccggcgtccccgcccagccgagagggccggcgcctacctgagggcccctgtgtcccgaacccggagcggaggcgcccaacccggcagacgggtgcaggcccggcctttccccacgcggactccgcgcgaccccggccctctccctgcggccgcagggcttccccgcctggcgcctgccctccagggctggggcctcgcctggcgggaccccgcagcagccccggccccatccccgcccagagccgggcgtcgtgtgggtccgtgggtgataattgagagcgtcagacccaggactgttcagggaggagccccggtcagactcccacgtgtgaagaccgggtcccaagtggcaagggctggcctggggcgggcagcttgggtcctggacgttgataggaagcggaaggggaatcgcgggaagctggcccaggtcaggtccgcaaaggcttctgaagaagaggaagggcgagtaggggcacctggacgctgatggtggccaggatgctcagctggccaggagggcagcacctgctggggacggtggccctgccttcatgcccaggacaccagctgggtccagctagcagccactgggaatcagaggaatggggcagagctgggcattcaggaccttgaggacacgtgaccccacccgcccaccgccactatcaggccccgggaccgcactgacaggaaaccttccgtcgtgagggagcacttcccaggggccgcagggacgacactctccagggaggccccagcaaccacaccatcttcttgctgtgagaggtctcaccccgggctacctcctgtcactactcactgccctggggtccgtgggcaagttgcccagggtgggggtgcctagccaggtgcagtccccgccccgcctagtcctcggcgtcacgcaatgctcacctcgcctcttccccactaacatcccagactttaaaattcagtaaatcagatgtacaccgaaaaaaaaaaaaaaaa

SEQ ID NO: 92 - DNA, 2892 bp, Homo sapiens
gcggagcagcgcagggagccaggcgggctgccggcgggtgtgaagaaaaaaatgacactccaatgggctgcagtggcaacctttctttatgccgaaataggactcattttaatcttctgcctaccttttattcctcctcagagatggcagaagattttttcatttaatgtctggggtaaaattgcaactttttggaacaaggctttccttaccattatcatcctattgattgttctatttctagatgctgtgagagaagtaaggaaatattcctcagttcataccattgagaagagctccaccagcagacctgatgcctatgaacacacacagatgaaactttttaggtctcaaagaaatctttacatttctggattttccctatttttttggctagttttgagacgtctggttacgcttattactcaactggcaaaagaactgtcaaacaaaggtgtacttaaaactcaagcagaaaatactaacaaggctgccaaaaaatttatggaagaaaacgaaaaactaaaaaggattttgaaaagccatggtaaagatgaagaatgtgttttggaagcagaaaataaaaaactagtagaagaccaggagaaactgaaaactgaattaaggaagacttcagatgccctttctaaggcacaaaatgatgtgatggaaatgaagatgcagtcagagagactttcgaaagaatatgatcaactcctgaaagaacactctgaacttcaggatcgtttagaaagaggcaacaagaaaagactgtgaactttataaaagacacttgcaatatactgtgtcaaaatgataattttgttatgttagcctctagaaaatttaagttcagaaaaatgcactatgaccggttcgtaatttttttaatgccacacataggttgtattgtaatggcattatcaaaatatttgatgatgtttcagatatattgcaaagtctgtattccagctcttaagaaaaatataagcatgttaaataccatatttacatattgataatgtcattggtatatggtggctgtttaccaataaaaggaaaaaattcattaaccggttgcttccaaaattagaagttttaagttgcatgaaaccattaatagccttgaaagctttgataagttttcagtaataataacctatttaatcagatgatgatgtgtttgaaaatagtgttcaatatcagcaaatttgtacacagggaatgtaaataaggataactgatcagagttatccactgtatttataaggaagagtcggaaaaaacaatgaccttagttttttttaagcctgatgatactatggtttactctaataagatagctatattgataattatatttttgttactgtgcccttgcacattttggtctttttgttaatatttttattaataacacataattagtaaccactctactgtttcaagttaatctagtaatagagcttacatatatttgtataactgctataccactgaactgaatttattttacaacagtgtagaattcttgaaaagttaacgtagaaaatatccaaaaagcagtatttctagaaagtgtccaaaaagcagtatttctttcccttggttgtgagagtaactaattatataaatattacctcaaaaatacatacactggtatcacacagtctttctacaatgtttctgtattctgaaagctaaatattaagtactatttttccattcaaatattcatttagaatttcctttagaagatggcagtgattataatattaatatgatttcatttgttccagtgtttagacatgaaatcatcttccttgtctcatgaaaacctaaatataaaaaaaaggaaaatactggagtttttatttctcttgtctttgttacatcctctgtttattataattttagcaccaacttcacacctagctaatttttttcatcataaagtggatgaaatgagcaagtacctaaaaattttatttcagataaaagtcaggagttactgctaaaaaacagacatgtaggagacattcaacaggagtatgaaatgagagttagaccatatgggctgacaacaccataaataacaagaaaagggagtgctgaaataggagagaacagagcaaatgttagctcaaagtatagacttagaaatatcaaagtaagagctatctggataaatatatagatattgagtgcttggaatcctagcctactatgtgaaaattaagtctaatgtcagaataacttacagaaaaatagaaaatgcacagctttaaaatgggcagagttaaaatctattcccagctttatcacttatttagccatgctagcctaggcctctatttccttgtctccaaaatgagaataataaaatttaggtcaggattactatataaactaagataatacagtgattctcaaagttgttcagactgtatagtaaggagaaagtctggttgcactttgaagagcttgaagatttgaaagattcccaaaaaagcattttaaagtttacatttaagggaccttggacctcaaccctctcaagtttacaagtctgaaactttagacatcaaaagtttgagcagtttttccaaggcaacattgatagttagattcagggccaggctgtaagtctagaatttagatatcctgatcccccagataccgctcttctggttatacacagaccagctataatttgctaaacataaaatattgcagtgtattagccggctgtggctccagagtctgtgccctttaccaccgtgcccaactgtttcacatgctgtgtttggtagtttttcctagtactctccttaataatggtggtgtttagcaaattgtattacataaataaatatttatttcatggattga

SEQ ID NO: 93 - DNA, 4828 bp, Homo sapiens
agtggcgtcggaactgcaaagcacctgtgagcttgcggaagtcagttcagactccagcccgctccagcccggcccgacccgaccgcacccggcgcctgccctcgctcggcgtccccggccagccatgggcccttggagccgcagcctctcggcgctgctgctgctgctgcaggtctcctcttggctctgccaggagccggagccctgccaccctggctttgacgccgagagctacacgttcacggtgccccggcgccacctggagagaggccgcgtcctgggcagagtgaattttgaagattgcaccggtcgacaaaggacagcctatttttccctcgacacccgattcaaagtgggcacagatggtgtgattacagtcaaaaggcctctacggtttcataacccacagatccatttcttggtctacgcctgggactccacctacagaaagttttccaccaaagtcacgctgaatacagtggggcaccaccaccgccccccgccccatcaggcctccgtttctggaatccaagcagaattgctcacatttcccaactcctctcctggcctcagaagacagaagagagactgggttattcctcccatcagctgcccagaaaatgaaaaaggcccatttcctaaaaacctggttcagatcaaatccaacaaagacaaagaaggcaaggttttctacagcatcactggccaaggagctgacacaccccctgttggtgtctttattattgaaagagaaacaggatggctgaaggtgacagagcctctggatagagaacgcattgccacatacactctcttctctcacgctgtgtcatccaacgggaatgcagttgaggatccaatggagattttgatcacggtaaccgatcagaatgacaacaagcccgaattcacccaggaggtctttaaggggtctgtcatggaaggtgctcttccaggaacctctgtgatggaggtcacagccacagacgcggacgatgatgtgaacacctacaatgccgccatcgcttacaccatcctcagccaagatcctgagctccctgacaaaaatatgttcaccattaacaggaacacaggagtcatcagtgtggtcaccactgggctggaccgagagagtttccctacgtataccctggtggttcaagctgctgaccttcaaggtgaggggttaagcacaacagcaacagctgtgatcacagtcactgacaccaacgataatcctccgatcttcaatcccaccacgtacaagggtcaggtgcctgagaacgaggctaacgtcgtaatcaccacactgaaagtgactgatgctgatgcccccaataccccagcgtgggaggctgtatacaccatattgaatgatgatggtggacaatttgtcgtcaccacaaatccagtgaacaacgatggcattttgaaaacagcaaagggcttggattttgaggccaagcagcagtacattctacacgtagcagtgacgaatgtggtaccttttgaggtctctctcaccacctccacagccaccgtcaccgtggatgtgctggatgtgaatgaagcccccatctttgtgcctcctgaaaagagagtggaagtgtccgaggactttggcgtgggccaggaaatcacatcctacactgcccaggagccagacacatttatggaacagaaaataacatatcggatttggagagacactgccaactggctggagattaatccggacactggtgccatttccactcgggctgagctggacagggaggattttgagcacgtgaagaacagcacgtacacagccctaatcatagctacagacaatggttctccagttgctactggaacagggacacttctgctgatcctgtctgatgtgaatgacaacgcccccataccagaacctcgaactatattcttctgtgagaggaatccaaagcctcaggtcataaacatcattgatgcagaccttcctcccaatacatctcccttcacagcagaactaacacacggggcgagtgccaactggaccattcagtacaacgacccaacccaagaatctatcattttgaagccaaagatggccttagaggtgggtgactacaaaatcaatctcaagctcatggataaccagaataaagaccaagtgaccaccttagaggtcagcgtgtgtgactgtgaaggggccgccggcgtctgtaggaaggcacagcctgtcgaagcaggattgcaaattcctgccattctggggattcttggaggaattcttgctttgctaattctgattctgctgctcttgctgtttcttcggaggagagcggtggtcaaagagcccttactgcccccagaggatgacacccgggacaacgtttattactatgatgaagaaggaggcggagaagaggaccaggactttgacttgagccagctgcacaggggcctggacgctcggcctgaagtgactcgtaacgacgttgcaccaaccctcatgagtgtcccccggtatcttccccgccctgccaatcccgatgaaattggaaattttattgatgaaaatctgaaagcggctgatactgaccccacagccccgccttatgattctctgctcgtgtttgactatgaaggaagcggttccgaagctgctagtctgagctccctgaactcctcagagtcagacaaagaccaggactatgactacttgaacgaatggggcaatcgcttcaagaagctggctgacatgtacggaggcggcgaggacgactaggggactcgagagaggcgggccccagacccatgtgctgggaaatgcagaaatcacgttgctggtggtttttcagctcccttcccttgagatgagtttctggggaaaaaaaagagactggttagtgatgcagttagtatagctttatactctctccactttatagctctaataagtttgtgttagaaaagtttcgacttatttcttaaagcttttttttttttcccatcactctttacatggtggtgatgtccaaaagatacccaaattttaatattccagaagaacaactttagcatcagaaggttcacccagcaccttgcagattttcttaaggaattttgtctcacttttaaaaagaaggggagaagtcagctactctagttctgttgttttgtgtatataattttttaaaaaaaatttgtgtgcttctgctcattactacactggtgtgtccctctgcctttttttttttttttaagacagggtctcattctatcggccaggctggagtgcagtggtgcaatcacagctcactgcagccttgtcctcccaggctcaagctatccttgcacctcagcctcccaagtagctgggaccacaggcatgcaccactacgcatgactaattttttaaatatttgagacggggtctccctgtgttacccaggctggtctcaaactcctgggctcaagtgatcctcccatcttggcctcccagagtattgggattacagacatgagccactgcacctgcccagctccccaactccctgccattttttaagagacagtttcgctccatcgcccaggcctgggatgcagtgatgtgatcatagctcactgtaacctcaaactctggggctcaagcagttctcccaccagcctcctttttatttttttgtacagatggggtcttgctatgttgcccaagctggtcttaaactcctggcctcaagcaatccttctgccttggccccccaaagtgctgggattgtgggcatgagctgctgtgcccagcctccatgttttaatatcaactctcactcctgaattcagttgctttgcccaagataggagttctctgatgcagaaattattgggctcttttagggtaagaagtttgtgtctttgtctggccacatcttgactaggtattgtctactctgaagacctttaatggcttccctctttcatctcctgagtatgtaacttgcaatgggcagctatccagtgacttgttctgagtaagtgtgttcattaatgtttatttagctctgaagcaagagtgatatactccaggacttagaatagtgcctaaagtgctgcagccaaagacagagcggaactatgaaaagtgggcttggagatggcaggagagcttgtcattgagcctggcaatttagcaaactgatgctgaggatgattgaggtgggtctacctcatctctgaaaattctggaaggaatggaggagtctcaacatgtgtttctgacacaagatccgtggtttgtactcaaagcccagaatccccaagtgcctgcttttgatgatgtctacagaaaatgctggctgagctgaacacatttgcccaattccaggtgtgcacagaaaaccgagaatattcaaaattccaaattttttcttaggagcaagaagaaaatgtggccctaaagggggttagttgaggggtagggggtagtgaggatcttgatttggatctctttttatttaaatgtgaatttcaacttttgacaatcaaagaaaagacttttgttgaaatagctttactgtttctcaagtgttttggagaaaaaaatcaaccctgcaatcactttttggaattgtcttgatttttcggcagttcaagctatatcgaatatagttctgtgtagagaatgtcactgtagttttgagtgtatacatgtgtgggtgctgataattgtgtattttctttgggggtggaaaaggaaaacaattcaagctgagaaaagtattctcaaagatgcatttttataaattttattaaacaattttgttaaaccataaaaaaaaaaaaa

SEQ ID NO: 94 - DNA, 3020 bp, Homo sapiens
agggccgggaaacacgataaaggggacatgccgggagttgcagtaccctcaggaaggtagcgtcttgatctgcgtggcgtggttctgtgccttgggaagagatgaatgggaagcggccagcggagcccggcccagcccgggtgggaaaaaagggaaagaaggaggtgatggcggagttttcggacgctgttacggaagaaaccttgaaaaagcaggtggctgaggcctggagccgcaggacgccgttcagtcacgaagtcattgtcatggacatggacccttttcttcactgtgtgatcccaaacttcatccaaagccaagacttcttagaagggcttcagaaggaactgatgaacttggacttccatgagaagtataatgatttatataagttccagcagtctgatgatttgaagaagagaagagagcctcacatctccactttaaggaaaattctgtttgaagatttccggtcctggctttctgatatttctaaaattgacctggaatcaaccattgacatgtcctgtgctaaatatgaattcactgatgccctgctgtgccatgatgatgagctggaagggcgccggattgccttcatcctgtacctggttcctccctgggacaggagcatgggtggtaccctggacctgtacagcattgatgaacactttcagccgaagcagattgtcaagtctcttatcccttcgtggaacaaactggttttctttgaagtatctcctgtgtcctttcaccaggtgtctgaagtgctgtctgaagaaaagtcacgtttgtctataagtggctggtttcatggtccatcattgactcggcctcccaactactttgaaccccccatacctcggagccctcacatcccacaagatcatgagattttgtatgattggatcaaccctacttatctggacatggattaccaagttcaaattcaagaagagtttgaagaaagttctgaaattctcctgaaggagtttcttaagcctgagaaattcacgaaagtctgtgaggccttggagcatggacatgtggaatggagcagccgaggtccccctaacaaaaggttttatgagaaagctgaggagagtaagcttcctgagatattgaaggagtgcatgaagttatttcgctctgaggcactattcttgctgctctccaacttcacaggcctgaagcttcatttcttggccccttcggaagaagatgagatgaatgataaaaaagaggcagaaaccactgatatcactgaagaagggactagccatagtcctcctgagccagagaataatcagatggccatcagcaacaacagccaacagagcaatgagcagacagacccagagccagaggaaaatgaaacaaagaaagaatcaagtgttcccatgtgccaaggggaactgaggcattggaagaccggtcactacactttaattcatgaccatagcaaggctgaatttgccctagacttaattctgtactgtggctgtgaaggctgggagccagaatatggcggttttacttcttacattgccaaaggtgaagatgaagagctgctaacagtgaatccagaaagcaattctttggcattggtctacagagacagagagactctgaaatttgtcaagcatattaaccaccgaagcctggaacaaaagaaaaccttcccaaacagaacaggtttctgggacttttcattcatctattatgaatgacagcactgggcaaagctgaacaaaaatgtgacccttcgtaattactgggaagtctgaaagagctaagcatggagtcaaggagaactacatggtagcttgcctgacagtgttcttaaaactggttgtcttttactaggactcataatgattgtcctcaaccgagaccttgagcttgcagctaagtacttatctcttgattaaaaaaaaaaagttggcttttttttttttaacatttagtcctttttccatattggcttcttcagtgaatttttaagttcaatttgtttttattgaggtaaaatatttataacataaaactgaccagcttacccatttttaaatatgcaattcagtggattaagtacattctcattgttgtccagccatcaccatcatccatctccagaagttttccatcttcccaaattctgtgcccattgaacaataactccccacctccccttcccctagcaacagccataccttttgtctctatcatcaacttcactactcatatttctcatgtaagtggaatcatacagtatttgtccttttgtgactggtttcacttagcataaagtctttaagatgcatccatgtttccagtgtttcggtttttttagaaaaactcatacgtgattgcagccgggcatggtggctcacgcctgtaatcccagcacttgggaggccaaggcaggcggatcacctgaggtcaggagttaaagaccagcctgacaaacatggagaaaccccatctctactaaaaatacaaaattagctgggcgtggtggcacatgcctgtaatcccagctactcaggaggctggggcaggagaattggttgaacccaggaggcggaggttgcagtgagccgagattgtgccactgcactccagcctgggcaacaagagtgaaactctgtctcaaaaaaaaaaaagaagaaaaaaacataagtgattgcagaattttgttcttctcataatttctggtttagaaaattatggagccttacatcctgatcatgctgggccttagaattctgacacagtgagtcatcacatttcctcccactgcctgtggccttgttccaccatgactctcacagtacagtgtaggcttagtgtagtattattcccttggaaagggtctggcctaccatcacatgccccaagaaacttctggttggtaaagaagataggctgcttattgccatgtgtagtcacttccaagtgcccactgcctttccatcctgcaattgtggcctgtgtataattaaatgattttagcctca

SEQ ID NO: 95 - DNA, 2200 bp, Homo sapiens
caggcggcggagccccaaccccacccagtgcggagcgcgccgcgagccccgccgcaagctgagcgcctccgcccgccaggcgcgccggcgccgggccatgtactcggggaaccgcagcggcggccacggctactgggacggcggcggggccgcgggcgctgaggggccggcgccggcggggacactgagccccgcgcccctcttcagccccggcacctacgagcgcctggcgctgctgctgggctccattgggctgctgggcgtcggcaacaacctgctggtgctcgtcctctactacaagttccagcggctccgcactcccactcacctcctcctggtcaacatcagcctcagcgacctgctggtgtccctcttcggggtcacctttaccttcgtgtcctgcctgaggaacggctgggtgtgggacaccgtgggctgcgtgtgggacgggtttagcggcagcctcttcgggattgtttccattgccaccctaaccgtgctggcctatgaacgttacattcgcgtggtccatgccagagtgatcaatttttcctgggcctggagggccattacctacatctggctctactcactggcgtgggcaggagcacctctcctgggatggaacaggtacatcctggacgtacacggactaggctgcactgtggactggaaatccaaggatgccaacgattcctcctttgtgcttttcttatttcttggctgcctggtggtgcccctgggtgtcatagcccattgctatggccatattctatattccattcgaatgcttcgttgtgtggaagatcttcagacaattcaagtgatcaagattttaaaatatgaaaagaaactggccaaaatgtgctttttaatgatattcaccttcctggtctgttggatgccttatatcgtgatctgcttcttggtggttaatggtcatggtcacctggtcactccaacaatatctattgtttcgtacctctttgctaaatcgaacactgtatacaatccagtgatttatgtcttcatgatcagaaagtttcgaagatcccttttgcagcttctgtgcctccgactgctgaggtgccagaggcctgctaaagacctaccagcagctggaagtgaaatgcagatcagacccattgtgatgtcacagaaagatggggacaggccaaagaaaaaagtgactttcaactcttcttccatcatttttatcatcaccagtgatgaatcactgtcagttgacgacagcgacaaaaccaatgggtccaaagttgatgtaatccaagttcgtcctttgtaggaatgaagaatggcaacgaaagatggggccttaaattggatgccacttttggactttcatcataagaagtgtctggaatacccgttctatgtaatatcaacagaaccttgtggtccagcaggaaatccgaattgcccatatgctcttgggcctcaggaagaggttgaacaaaaacaaattcttttaattcaacgggtgctttacataatgaaaaaaccacttgtggcacacgatgggcatctaacatcatcatcttctaatgtgttggagattttcatttcaaatatattttttaaattactctattttccaaaacacgttaatgcatttttctcgaaaataccttactgtaaaaataactgtcgcgtacacatgtgtgaagtagctagaacatactgaattttttttgtactgttggactctattcagtgtcatgtcctatatctgatcaagttatcaaggagataattctagaatgaaaaagaaaatcctcttgttggaaacaaaagacgttttatatgtgcagtatgacaaagaggagtttcagagacaactttgaatccttgtcagcctggagaccagcaccagaggaatctacaaggcaaactcccatatatttgcttcccccaaattgctgcccctacagactcaaagctctttttctttgttttgttgtttctctaaaaatttactgttctttgtcgatgctatataagccagggagttctaagacgccagctctttgagatttgctcattcccctgtatttcccacatatatattacatatacccgctaataaatttatgtttgttttaaaaaaaaaaaaaaaaaaaaaaaaaaaaaaaaaaaaaaaaaaaaaaaaaaaaaaaaaaaaaaaaaaaaaaaaaaaaaa

SEQ ID NO: 96 - DNA, 802 bp, Homo sapiens
gcggtttgctaagtggtcggttcctggagctgcggtcttctgctagcctgatccgcagcttcagcctccgccgcctcctcagccctcggcgccgccgcctgacccgcaggccgccgcgggccgcagagcccatgagggcgcgggcaccgccgccgcctccgcggcgtcgccgtcgtcccggagcgccccgagctggcgcgggcatggccgcggcatgagcgtggagccgccgccggagctggaggagaaggcggcgtcggagcccgaggcgggagccatgccggagaagcgcgcgggcgcgcaggccgcggggagcacctggctacaaggctttggcccaccaagtgtgtaccatgctgctattgtcatcttccttgaattctttgcgtggggccttttgacaactccaatgttgactgttctacatgaaacattttctcaacacacattcctcatgaatggtctcattcaaggtgtaaagggcctgctctcttttttgagtgccccactcattggtgccctgtctgatgtgtgggggaggaagccctttctcctcggcactgtattctttacctgcttcccaatcccactgatgaggatcagcccatgccgggtgtggtggcgtgcacctgtagtcccagctacctgtggcaggagaatggcttgaacccaggaagcggaggttgcagtgagccaagatcacaccattgcactccagcctaggcatggtgagactccatctcaaaaaaaaaaaaaaattaaattgtattgattttctcttttcaaaaaaaaaaaaaaaaaa

SEQ ID NO: 97 - DNA, 4549 bp, Homo sapiens
cggcaggaaggccatggcggggcccgagcgctggggccccctgctcctgtgcctgctgcaggccgctccagggaggccccgtctggcccctccccagaatgtgacgctgctctcccagaacttcagcgtgtacctgacatggctcccagggcttggcaacccccaggatgtgacctattttgtggcctatcagagctctcccacccgtagacggtggcgcgaagtggaagagtgtgcgggaaccaaggagctgctatgttctatgatgtgcctgaagaaacaggacctgtacaacaagttcaagggacgcgtgcggacggtttctcccagctccaagtccccctgggtggagtccgaatacctggattacctttttgaagtggagccggccccacctgtcctggtgctcacccagacggaggagatcctgagtgccaatgccacgtaccagctgcccccctgcatgcccccactggatctgaagtatgaggtggcattctggaaggagggggccggaaacaagaccctatttccagtcactccccatggccagccagtccagatcactctccagccagctgccagcgaacaccactgcctcagtgccagaaccatctacacgttcagtgtcccgaaatacagcaagttctctaagcccacctgcttcttgctggaggtcccagaagccaactgggctttcctggtgctgccatcgcttctgatactgctgttagtaattgccgcagggggtgtgatctggaagaccctcatggggaacccctggtttcagcgggcaaagatgccacgggccctggacttttctggacacacacaccctgtggcaacctttcagcccagcagaccagagtccgtgaatgacttgttcctctgtccccaaaaggaactgaccagaggggtcaggccgacgcctcgagtcagggccccagccacccaacagacaagatggaagaaggaccttgcagaggacgaagaggaggaggatgaggaggacacagaagatggcgtcagcttccagccctacattgaaccaccttctttcctggggcaagagcaccaggctccagggcactcggaggctggtggggtggactcagggaggcccagggctcctctggtcccaagcgaaggctcctctgcttgggattcttcagacagaagctgggccagcactgtggactcctcctgggacagggctgggtcctctggctatttggctgagaaggggccaggccaagggccgggtggggatgggcaccaagaatctctcccaccacctgaattctccaaggactcgggtttcctggaagagctcccagaagataacctctcctcctgggccacctggggcaccttaccaccggagccgaatctggtccctgggggacccccagtttctcttcagacactgaccttctgctgggaaagcagccctgaggaggaagaggaggcgagggaatcagaaattgaggacagcgatgcgggcagctggggggctgagagcacccagaggaccgaggacaggggccggacattggggcattacatggccaggtgagctgtcccccgacatcccaccgaatctgatgctgctgctgcctttgcaaggactactgggcttcccaagaaactcaagagcctccgtacctcccctgggcggcggaggggcattgcacttccgggaagtccacctagcggctgtttgcctgtcgggctgagcaacaagatgcccctccctcctgtgacccgccctctttaggctgagctataagaggggtggacacagggtgggctgaggtcagaggttggtggggtgtcatcacccccattgtccctagggtgacaggccagggggaaaaattatccccggacaacatgaaacaggtgaggtcaggtcactgcggacatcaagggcggacaccaccaaggggccctctggaacttgagaccactggaggcacacctgctatacctcatgcctttcccagcagccactgaactcccccatcccagggctcagcctcctgattcatgggtcccctagttaggcccagataaaaatccagttggctgagggttttggatgggaagggaagggtggctgtcctcaaatcctggtctttggagtcatggcactgtacggttttagtgtcagacagaccggggttcaaatcccagctctgctgttcactggttgtatgatcttggggaagacatcttccttctctgcctcggcttcctcatctgcagctacgcctgggtgtggtgagggttctaggggatctcagatgtgtgtagcacggagcctgctgtgtcctgggtgctctctacgtggtggccggtagaattctccatctatccaggctccaggagacccctgggcatctcccacctgtggcccctaaacccagagtgactgagagcacttaacattcagcttgtctcatccccagtctacctccttccttctaccctcactgcctcccagtcaggagagtgagctctcagaagccagagccccacccaaggggaccctggtctctccgccttcacctagcaatgggaaccctgcttcccaggggaggaaccaactgctccaccttctagggacccagtttgttggagtaggacagtaacatggcaggaatcggacttctgggcctgtaatcccagtttggatggcacgttagactcttggttgaccgttgtggtccttagaagtcccattctcccttccagttatgagaaaccaatgccttctagattcaggtgactatccttacctgggggtgctgatgcatcctcagttaacctacacccacctgaatatagatgagcgtagctgagttttcacccgtaggaccgaagtgttttgtggtggagtatctgaacaaccttggctctgtggccattcaacctgccaggactaacatttctggatttgtgaagaagggatcttcaaagccattgaacccacagagctgtgttgctttaaagccaccacaagggtacagcattaaatggcagaactggaaaagcttcttagggcatctcatccagggattctcaaaccatgtcccccagaggccttgggctgcagttgcagggggcgccatggggctataggagcctcccactttcaccagagcagcctcactgtgccctgattcacacactgtggctttccacgtgaggttttgtttagagggatccactactcaagaaaaagttagcaaaccactccttttgttgcaaaggagctgaggtcaagggtggcaaaggcacttgtccaaggtcgcccagcagtgctgctctgatgacttgtgcacatccccaagggtaagagcttcgatctctgcacagccgggccaacctctgaccccttgtccatgtcagtaaaatatgaaggtcacagccaggatttctaagggtcaggaggccttcaccgctgctggggcacacacacacacatgcatacacacatacgacacacacctgtgtctccccaggggttttccctgcagtgaggcttgtccagatgattgagcccaggagaggaagaacaaacaaactacggagctggggagggctgtggcttggggccagctcccagggaaattcccagacctgtaccgatgttctctctggcaccagccgagctgcttcgtggaggtaacttcaaaaaagtaaaagctatcatcagcatcatcttagacttgtatgaaataaccactccgtttctattcttaaaccttaccatttttgttttgttttgtttttttgagtcggagttttgttctttttgcctaggctggagtgcagtggtacaatctcggctcactgcaacctccacctcccgggttcaagtgattctcctgcctcagcctcccaagtagctgggattacaggcacccgccaccacacctggctaatttttttgtatttttagtagagacggggtttcaccatgttggccaggctggtctcgaactcctgacctcaggtgatccgcccgcctcggcctcccaaagtgctgggattacaggcgtgagccaccgcgcccagccaaaccttactatttttttaaagaattttttccagagtttaatttctgacatagcttaagttttccagtaactctaaactccatctcctttatcgtcattaagtcattcacaaaaagccaggagaagcatttggaaagggcatgataatcagtataataatttgccttgtgtggtcagcacttaactgtttacaaagccctttcacgtgcacagcaggtgggaactgcgcggtgtgggctgggcctgcgctggaagcatatcccgtgaaaagtgttagtgccttaggtgaaagcaacatgtatccctttagactactaacggtatatgttgttcttatgtatttgtatttatttctattttttctatgtttatgtcatatttaaacgatatcctactgcttgttggtattaccctaaactgtttaaataaagagctctatttttaaagaaaaaaggtacaattga

SEQ ID NO: 98 - DNA, 3328 bp, Homo sapiens
aggcgctagaggcgggggcgccgggaggcgcgggctttgctcctggggtctcggccttggccggctggacctgaccctagggcggcttgcgcagctgtcgggacgtgactgcgttcagccgcgtcgggcgtgcttcccagacttgcccaagttcgggtgccctagctgcccctttgcagccgctggcctacccggcccgcgggtgagaaggttgcgacgggaggtgggtggaactcgccagcgccgggaccgcggattggctgcctcggctttctcttttccccgtgggctccggcgtgaggcgctgaagcggccggcagccggcgaccggccctcaccgtccgccgggttgcgctctgcttttgcggtgaggcgttgaccacgcccatatgaattggagctctccgccagtaggagtttccggaaggagtttgaatttttgtgatttttatgcttgtttggtcggtggaatatgttgggatttatgtttgcctctgaacaagtgtcttgctcacatcgtaaatgactttctctccgaaacgctaaatattctttcccgcaggagctcatatccttattttccatgacagatcttaacgacaatatatgcaaaagatatataaagatgataactaatatagttatactgagcctgatcatttgcatttcgttagctttctggattatatcaatgactgcaagcacctattatggtaacttacgacctatttctccgtggcgttggctgttttctgttgttgttcctgttctgatcgtctctaatggccttaaaaagaaaagtctagatcacagtggggctctaggagggctagtcgttggatttatcctaaccattgcaaatttcagcttttttacctctttgctgatgtttttcttgtcttcttcgaaactcactaaatggaagggagaagtgaagaagcgtctagattcagaatataaggaaggtgggcaaaggaattgggttcaggtgttctgtaatggagctgtacccacagaactggccctgctgtacatgatagaaaatggccccggggaaatcccagtcgatttttccaagcagtactccgcttcctggatgtgtttgtctctcttggctgcactggcctgctctgctggagacacatgggcttcagaagttggcccagttctgagtaaaagttctccaagactgataacaacctgggagaaagttccagttggtaccaatggaggagttacagtggtgggccttgtctccagtctccttggtggtacctttgtgggcattgcatacttcctcacacagctgatttttgtgaatgatttagacatttctgccccgcagtggccaattattgcatttggtggtttagctggattactaggatcaattgtggactcatacttaggggctacaatgcagtatactgggttggatgaaagcactggcatggtggtcaacagcccaacaaataaggcaaggcacatagcagggaaacccattcttgataacaacgcagtgaatctgttttcttctgttcttattgccctcttgctcccaactgctgcttggggtttttggcccagggggtgaactttatttcatttccacaggttgaaactggtgagtccagctaaatttgcaattccaactttcatcctaagaataataactgtaatggcaaagcggaaatgccagttcctcctgtattccattgagatgggatttcacattttcctctcatcaactcccctgtaatagctagcgtctttctagtgaaagagaagaattcctagaacttatgcatttttttcctgctgaatggaagtcttgagcaatgaagctatattgtccctacatattactatatattgaactgaaagttcttacataatcaatgtcaagttttgtcttattttgttttgtttgtttaaaccagtgtaggaaataaaagtgatgatatttaaaatagttctcagttgaagcagagaaatgccactgtgctagttgcccaaatgttgtatctattttaaatagtttaagctgatgtgtatgggagcctaaacaagtgtagtatcctgaacttctcccattaattgctattcacaattgggaaaagtgtggagattggttcctagtgagttttgtggcctactccacatttgttcttccttcctcagggttagtgatgaaaaaaagtaaatatctttttcatatgtccattagaatgtatgaaaaaaatcattttaactaaaagcaaaagaattttatcttatatctaaaaaatatataacttactatatgtttcagttgctctctgaacaaaaattatcttcaatttaatatgtggaatgtgttttctagctttctttgaattatgtatggcaacctggtttagcactggcatcctgaacagttaagagtcactgggaaattattgtatttctttataaatttactgtcatatcaattgctggaaaatgctatgatttttctattattaccttctaagttgtattctctcttacactgtagcctcaactaaggcaattctgctatgtttgttcttcactatgatttactgtgtgccaaaggagttttgacagggtacagagtattttactaaaagtatttttaaatgtttctcatgtgatttctgtaccttcttcctcctgccccttttgcttttttaaagaaactggggaaggatttatgaatacaccaccaccagagtggataatgcttagaattctttattggtggccctactatggtgatgatctagaactgacttacttcaggacagaagaaaaaacaatcacacccttaacctttaagccagttagatcagggggttgcaacaattgggttaaactttgggtatacattggaagcaccagggcatgtttgctttttttgtttatgtgtttgttttttgagacagagtctcacactgtggcccaggctggactccagcacagtggcatgatctcagctccgcctcctgggttcacgtgattctcatgcctcagcctcccgggtggctgggatcacaggcgtgcaccatcacgcccggctaatttttgtattttcagtcgagaccggcctggccaacgtggtgaaacaccgtctctactaaaaatacaaaaaattaggtgtggtggtgcgtgcctgtattcccggccactcgggaggctgaggcaggagaatcgctggaacctgggatgtggaggttgcagtgagccaagattgcaccactgtactccagcctgggcaacagagggagactccatctagactccatctcaaaaaaaaaaaaaaaaaaaa

SEQ ID NO: 99 - DNA, 3115 bp, Homo sapiens
cgctcccaggaggaacgagaatgaatatgactcaagcccgggttctggtggctgcagtggtggggttggtggctgtcctgctctacgcctccatccacaagattgaggagggccatctggctgtgtactacaggggaggagctttactaactagccccagtggaccaggctatcatatcatgttgcctttcattactacgttcagatctgtgcagacaacactacaaactgatgaagttaaaaatgtgccttgtggaacaagtggtggggtcatgatctatattgaccgaatagaagtggttaatatgttggctccttatgcagtgtttgatatcgtgaggaactatactgcagattatgacaagaccttaatcttcaataaaatccaccatgagctgaaccagttctgcagtgcccacacacttcaggaagtttacattgaattgtttgatcaaatagatgaaaacctgaagcaagctctgcagaaagacttaaacctcatggccccaggtctcactatacaggctgtgcgtgttacaaaacccaaaatcccagaagccataagaagaaattttgagttaatggaggctgagaagacaaaactccttatagctgcacagaaacaaaaggttgtggaaaaagaagctgagacagagaggaaaaaggcagttatagaagcagagaagattgcacaagtggcaaaaattcggtttcagcagaaagtgatggaaaaagaaactgaaaagcgcatttctgaaatcgaagatgctgcattcctggcccgagagaaagcgaaagcagatgctgaatattatgctgcacacaaatatgccacctcaaacaagcacaagttgaccccggaatatctggagctcaaaaagtaccaggccattgcttctaacagtaagatctattttggcagcaacatccctaacatgttcgtggactcctcatgtgctttgaaatattcagatattaggactggaagagaaagctcactcccctctaaggaggctcttgaaccctctggagagaacgtcatccaaaacaaagagagcacaggttgatgcaagaggtggaaatgttctccatatcaagatgtggcccaaggggttaagtgggaacaatcattatacggactcttcagatttacagagaacttacacttcatctgttccacctctcctgcgatagtcctgggtgctccactgattggaggatagagccagctgtctgacacacaaatggtcttttcagccacagtcttatcaagtatcctatatgtattcctttctaaactgctactcatgaatgaggaaagtcttgctaagatactgcctgcactggaatgttaaacactaaatatataacaagctgtgttttcctaagctgagatctgttgaataatgtttacattcgtcccccggggaaatgtatgctcagccaccattcaagagatgactgagaaggagatggtaagttcaagaagactgattgcacctgggacccaggccctttctttgggatccagtcccagccttcatccatgtgattaagatccaggccgctgaagttccccaggaaatgatcttccacttgagcaaccttttacttgatacgatttgcacctttctgttttcctgcagtcagggtggtggcctgcagggacctgagctttgctacccaaccagattcctcatagagattcctaatcactagtttcttgtattcataaactcagagatacagagggcttggtttgaagttggggtgagatgaaacctttgctctgagccaaagctctggggccctgcattccctgcattgggttgatgactgtcagcatcactgccgcaggccatgcttgactaaggtacctggttttagccacagccacctccttgtatgttacctttcagctctggccaagagtgggacagggttttaaccacaaataggagcagcatgcaattcctagtgacttgctgcacagtattgtatcataattacaggaagtttttatttttaaaactggatctggggtatattcatttgccccatcacctctgtctaaaggcccaagtcctagggctgccatggtcacaagcacactgatgctccttaagattgtttatctggagcccacatagtgtggaacaaaaagtcacctagaaagcatccttggtcatcattgtctccttcccacctggcccagagatgcttaaatccaagttgtttctccagctgtcacctcccccaggagatcaggattccactgacgtcctgggcagccagtgaatttaattttccatgagaaacaacagagttaacctgtggcattaggagacctacttcatgtggaccctttttttccttcagtttaacttttctggagcagtgtgctgcgtagttcggcctgagtttgtgcagcttgttaagacaactcttgtgtacgctatgttgaagctcaacaaaaaagtcatgggaccacttctagaaatctttcagctgtcaggcctgtcagtctcatgacagtttgttggttgtgccaaacactttatttgggaaaggaaagcccagatttgaatgggtctttcccctgggccttatcctatagaggcatttgtaatatggagaaaataatttttcatttttgctcatttaattctataaattctctttataaatgaattttgtgttctttagttctccttaaaagaacttttgaattataaaaataaaatctttacctgtcgaattgttgctgcagatgattgttgtggaaaatctggatcattgacctctgtgctttcattcctagagatgttttatagttacatgagcaaaagctgttgccccaaagtgatggccctggaggcggggctgaggaacagggaaatgccgctgtgaagtcttaaagcacttctgcttaaactccatgtgtgaggagtgtgcctccctgtgccctctcagctctgaggctggccgtctttcggggtgttccttttggcaaatatacactgtaatcttgagtctaaatttatatgttgaaatgctaccttttttaaaataagaaactaaataaaattattttactatcaaaaaaaaaaaaaaa

SEQ ID NO: 100 - DNA, 8680 bp, Homo sapiens
acggggcctgaagcggcggtaccggtgctggcggcggcagctgaggccttggccgaagccgcgcgaacctcagggcaagatgcttggaaccggacctgccgccgccaccaccgctgccaccacatctagcaatgtgagcgtcctgcagcagtttgccagtggcctaaagagccggaatgaggaaaccagggccaaagccgccaaggagctccagcactatgtcaccatggaactccgagagatgagtcaagaggagtctactcgcttctatgaccaactgaaccatcacatttttgaattggtttccagctcagatgccaatgagaggaaaggtggcatcttggccatagctagcctcataggagtggaaggtgggaatgccacccgaattggcagatttgccaactatcttcggaacctcctcccctccaatgacccagttgtcatggaaatggcatccaaggccattggccgtcttgccatggcaggggacacttttaccgctgagtacgtggaatttgaggtgaagcgagccctggaatggctgggtgctgaccgcaatgagggccggagacatgcagctgtcctggttctccgtgagctggccatcagcgtccctaccttcttcttccagcaagtgcaacccttctttgacaacatttttgtggccgtgtgggaccccaaacaggccatccgtgagggagctgtagccgcccttcgtgcctgtctgattctcacaacccagcgtgagccgaaggagatgcagaagcctcagtggtacaggcacacatttgaagaagcagagaagggatttgatgagaccttggccaaagagaagggcatgaatcgggatgatcggatccatggagccttgttgatccttaacgagctggtccgaatcagcagcatggagggagagcgtctgagagaagaaatggaagaaatcacacagcagcagctggtacacgacaagtactgcaaagatctcatgggcttcggaacaaaacctcgtcacattacccccttcaccagtttccaggctgtacagccccagcagtcaaatgccttggtggggctgctggggtacagctctcaccaaggcctcatgggatttgggacctcccccagtccagctaagtccaccctggtggagagccggtgttgcagagacttgatggaggagaaatttgatcaggtgtgccagtgggtgctgaaatgcaggaatagcaagaactcgctgatccaaatgacaatccttaatttgttgccccgcttggctgcattccgaccttctgccttcacagatacccagtatctccaagataccatgaaccatgtcctaagctgtgtcaagaaggagaaggaacgtacagcggccttccaagccctggggctactttctgtggctgtgaggtctgagtttaaggtctatttgcctcgcgtgctggacatcatccgagcggccctgcccccaaaggacttcgcccataagaggcagaaggcaatgcaggtggatgccacagtcttcacttgcatcagcatgctggctcgagcaatggggccaggcatccagcaggatatcaaggagctgctggagcccatgctggcagtgggactaagccctgccctcactgcagtgctctacgacctgagccgtcagattccacagctaaagaaggacattcaagatgggctactgaaaatgctgtccctggtccttatgcacaaaccccttcgccacccaggcatgcccaagggcctggcccatcagctggcctctcctggcctcacgaccctccctgaggccagcgatgtgggcagcatcactcttgccctccgaacgcttggcagctttgaatttgaaggccactctctgacccaatttgttcgccactgtgcggatcatttcctgaacagtgagcacaaggagatccgcatggaggctgcccgcacctgctcccgcctgctcacaccctccatccacctcatcagtggccatgctcatgtggttagccagaccgcagtgcaagtggtggcagatgtgcttagcaaactgctcgtagttgggataacagatcctgaccctgacattcgctactgtgtcttggcgtccctggacgagcgctttgatgcacacctggcccaggcggagaacttgcaggccttgtttgtggctctgaatgaccaggtgtttgagatccgggagctggccatctgcactgtgggccgactcagtagcatgaaccctgcctttgtcatgcctttcctgcgcaagatgctcatccagattttgacagagttggagcacagtgggattggaagaatcaaagagcagagtgcccgcatgctggggcacctggtctccaatgccccccgactcatccgcccctacatggagcctattctgaaggcattaattttgaaactgaaagatccagaccctgatccaaacccaggtgtgatcaataatgtcctggcaacaataggagaattggcacaggttagtggcctggaaatgaggaaatgggttgatgaactttttattatcatcatggacatgctccaggattcctctttgttggccaaaaggcaggtggctctgtggaccctgggacagttggtggccagcactggctatgtagtagagccctacaggaagtaccctactttgcttgaggtgctactgaattttctgaagactgagcagaaccagggtacacgcagagaggccatccgtgtgttagggcttttaggggctttggatccttacaagcacaaagtgaacattggcatgatagaccagtcccgggatgcctctgctgtcagcctgtcagaatccaagtcaagtcaggattcctctgactatagcactagtgaaatgctggtcaacatgggaaacttgcctctggatgagttctacccagctgtgtccatggtggccctgatgcggatcttccgagaccagtcactctctcatcatcacaccatggttgtccaggccatcaccttcatcttcaagtccctgggactcaaatgtgtgcagttcctgccccaggtcatgcccacgttccttaacgtcattcgagtctgtgatggggccatccgggaatttttgttccagcagctgggaatgttggtgtcctttgtgaagagccacatcagaccttatatggatgaaatagtcaccctcatgagagaattctgggtcatgaacacctcaattcagagcacgatcattcttctcattgagcaaattgtggtagctcttgggggtgaatttaagctctacctgccccagctgatcccacacatgctgcgtgtcttcatgcatgacaacagcccaggccgcattgtctctatcaagttactggctgcaatccagctgtttggcgccaacctggatgactacctgcatttactgctgcctcctattgttaagttgtttgatgcccctgaagctccactgccatctcgaaaggcagcgctagagactgtggaccgcctgacggagtccctggatttcactgactatgcctcccggatcattcaccctattgttcgaacactggaccagagcccagaactgcgctccacagccatggacacgctgtcttcacttgtttttcagctggggaagaagtaccaaattttcattccaatggtgaataaagttctggtgcgacaccgaatcaatcatcagcgctatgatgtgctcatctgcagaattgtcaagggatacacacttgctgatgaagaggaggatcctttgatttaccagcatcggatgcttaggagtggccaaggggatgcattggctagtggaccagtggaaacaggacccatgaagaaactgcacgtcagcaccatcaacctccaaaaggcctggggcgctgccaggagggtctccaaagatgactggctggaatggctgagacggctgagcctggagctgctgaaggactcatcatcgccctccctgcgctcctgctgggccctggcacaggcctacaacccgatggccagggatctcttcaatgctgcatttgtgtcctgctggtctgaactgaatgaagatcaacaggatgagctcatcagaagcatcgagttggccctcacctcacaagacatcgctgaagtcacacagaccctcttaaacttggctgaattcatggaacacagtgacaagggccccctgccactgagagatgacaatggcattgttctgctgggtgagagagctgccaagtgccgagcatatgccaaagcactacactacaaagaactggagttccagaaaggccccacccctgccattctagaatctctcatcagcattaataataagctacagcagccggaggcagcggccggagtgttagaatatgccatgaaacactttggagagctggagatccaggctacctggtatgagaaactgcacgagtgggaggatgcccttgtggcctatgacaagaaaatggacaccaacaaggacgacccagagctgatgctgggccgcatgcgctgcctcgaggccttgggggaatggggtcaactccaccagcagtgctgtgaaaagtggaccctggttaatgatgagacccaagccaagatggcccggatggctgctgcagctgcatggggtttaggtcagtgggacagcatggaagaatacacctgtatgatccctcgggacacccatgatggggcattttatagagctgtgctggcactgcatcaggacctcttctccttggcacaacagtgcattgacaaggccagggacctgctggatgctgaattaactgcgatggcaggagagagttacagtcgggcatatggggccatggtttcttgccacatgctgtccgagctggaggaggttatccagtacaaacttgtccccgagcgacgagagatcatccgccagatctggtgggagagactgcagggctgccagcgtatcgtagaggactggcagaaaatccttatggtgcggtcccttgtggtcagccctcatgaagacatgagaacctggctcaagtatgcaagcctgtgcggcaagagtggcaggctggctcttgctcataaaactttagtgttgctcctgggagttgatccgtctcggcaacttgaccatcctctgccaacagttcaccctcaggtgacctatgcctacatgaaaaacatgtggaagagtgcccgcaagatcgatgccttccagcacatgcagcattttgtccagaccatgcagcaacaggcccagcatgccatcgctactgaggaccagcagcataagcaggaactgcacaagctcatggcccgatgcttcctgaaacttggagagtggcagctgaatctacagggcatcaatgagagcacaatccccaaagtgctgcagtactacagcgccgccacagagcacgaccgcagctggtacaaggcctggcatgcgtgggcagtgatgaacttcgaagctgtgctacactacaaacatcagaaccaagcccgcgatgagaagaagaaactgcgtcatgccagcggggccaacatcaccaacgccaccactgccgccaccacggccgccactgccaccaccactgccagcaccgagggcagcaacagtgagagcgaggccgagagcaccgagaacagccccaccccatcgccgctgcagaagaaggtcactgaggatctgtccaaaaccctcctgatgtacacggtgcctgccgtccagggcttcttccgttccatctccttgtcacgaggcaacaacctccaggatacactcagagttctcaccttatggtttgattatggtcactggccagatgtcaatgaggccttagtggagggggtgaaagccatccagattgatacctggctacaggttatacctcagctcattgcaagaattgatacgcccagacccttggtgggacgtctcattcaccagcttctcacagacattggtcggtaccacccccaggccctcatctacccactgacagtggcttctaagtctaccacgacagcccggcacaatgcagccaacaagattctgaagaacatgtgtgagcacagcaacaccctggtccagcaggccatgatggtgagcgaggagctgatccgagtggccatcctctggcatgagatgtggcatgaaggcctggaagaggcatctcgtttgtactttggggaaaggaacgtgaaaggcatgtttgaggtgctggagcccttgcatgctatgatggaacggggcccccagactctgaaggaaacatcctttaatcaggcctatggtcgagatttaatggaggcccaagagtggtgcaggaagtacatgaaatcagggaatgtcaaggacctcacccaagcctgggacctctattatcatgtgttccgacgaatctcaaagcagctgcctcagctcacatccttagagctgcaatatgtttccccaaaacttctgatgtgccgggaccttgaattggctgtgccaggaacatatgaccccaaccagccaatcattcgcattcagtccatagcaccgtctttgcaagtcatcacatccaagcagaggccccggaaattgacacttatgggcagcaacggacatgagtttgttttccttctaaaaggccatgaagatctgcgccaggatgagcgtgtgatgcagctcttcggcctggttaacacccttctggccaatgacccaacatctcttcggaaaaacctcagcatccagagatacgctgtcatccctttatcgaccaactcgggcctcattggctgggttccccactgtgacacactgcacgccctcatccgggactacagggagaagaagaagatccttctcaacatcgagcatcgcatcatgttgcggatggctccggactatgaccacttgactctgatgcagaaggtggaggtgtttgagcatgccgtcaataatacagctggggacgacctggccaagctgctgtggctgaaaagccccagctccgaggtgtggtttgaccgaagaaccaattatacccgttctttagcggtcatgtcaatggttgggtatattttaggcctgggagatagacacccatccaacctgatgctggaccgtctgagtgggaagatcctgcacattgactttggggactgctttgaggttgctatgacccgagagaagtttccagagaagattccatttagactaacaagaatgttgaccaatgctatggaggttacaggcctggatggcaactacagaatcacatgccacacagtgatggaggtgctgcgagagcacaaggacagtgtcatggccgtgctggaagcctttgtctatgaccccttgctgaactggaggctgatggacacaaataccaaaggcaacaagcgatcccgaacgaggacggattcctactctgctggccagtcagtcgaaattttggacggtgtggaacttggagagccagcccataagaaaacggggaccacagtgccagaatctattcattctttcattggagacggtttggtgaaaccagaggccctaaataagaaagctatccagattattaacagggttcgagataagctcactggtcgggacttctctcatgatgacactttggatgttccaacgcaagttgagctgctcatcaaacaagcgacatcccatgaaaacctctgccagtgctatattggctggtgccctttctggtaactggaggcccagatgtgcccatcacgttttttctgaggcttttgtactttagtaaatgcttccactaaactgaaaccatggtgagaaagtttgactttgttaaatattttgaaatgtaaatgaaaagaactactgtatattaaaagttggtttgaaccaactttctagctgctgttgaagaatatattgtcagaaacacaaggcttgatttggttcccaggacagtgaaacaatagtaataccacgtaaatcaagccattcattttggggaacagaagatccataactttagaaatacgggttttgacttaactcacaagagaactcatcataagtacttgctgatggaagaatgacctagttgctcctctcaacatgggtacagcaaactcagcacagccaagaagcctcaggtcgtggagaacatggattaggatcctagactgtaaagacacagaagatgctgacctcacccctgccacctatcccaagacctcactggtctgtggacagcagcagaaatgtttgcaagataggccaaaatgagtacaaaaggtctgtcttccatcagacccagtgatgctgcgactcacacgcttcaattcaagacctgaccgctagtagggaggtttattcagatcgctggcagcctcggctgagcagatgcacagaggggatcactgtgcagtgggaccaccctcactggccttctgcagcagggttctgggatgttttcagtggtcaaaatactctgtttagagcaagggctcagaaaacagaaatactgtcatggaggtgctgaacacagggaaggtctggtacatattggaaattatgagcagaacaaatactcaactaaatgcacaaagtataaagtgtagccatgtctagacaccatgttgtatcagaataatttttgtgccaataaatgacatcagaattttaaacata

SEQ ID NO: 101 - DNA, 1925 bp, Homo sapiens
caggcggaagccggggagaaggcccaggaagtgacggccgcctcccggctaccggggacttctggagtccgagaagtcaacggcgcggttgctgcggccgccgcgctccccggcccgaggcgatggagaacggagcggtgtacagccccactacggaggaggacccgggccccgccagaggcccccggagcggcctcgctgcctactttttcatgggccggctcccattgctccggcgcgttctcaagggcttgcagctgttgctgtctctgctggccttcatctgtgaagaagttgtatcacaatgtactttatgtggaggactttatttttttgagtttgtaagctgcagtgcctttcttctgagtctccttatactgattgtgtattgcactccattttatgagagagttgataccacaaaagtaaaatcatcggatttttatattactttgggaacaggatgtgtgtttttgttggcatccatcatttttgtttccacacatgacaggacttcagctgagattgctgcaattgtgtttggatttatagcaagttttatgttcctacttgactttatcactatgctgtatgaaaaacgacaggagtcccagctgagaaaacctgaaaataccactagggctgaagccctcactgagccacttaatgcctaaagactctggggagcagatgttacctaaggtagtgaccctgcattgtggtgcctgagccctggcagaagctcttgtaaaatttgttaattgtttaaaccacttcttttggagagcaaggggaaggtcaagaaggcagttttatcaatattgtgtcagtcaccacaaagtaggccagataagttaaaaaaaatttttttttaaataataattgaaacttatctcaaatggagattttggtgggaggaggagaaaacaattgtttttaaatcacacagctcaacggttgataaatgattctgtcattctgttacaggtcattcttttactaggcttagcttccaaattatgctttatagctgtataaacatcgtgattatattcatctacttagaaattgttttatttttaaattaatttgcttagctgtttgttttgatgcttagattatgttctgttaatgggaatttaacatatttaagaaaccaatatttaaaatgttggtctaggtttttttccttaacatatattaccaggctttactgtatttcactcagccttaaatgttataatatttttggataacggttattaattctttgagaccttcgtatagcctataaaatgtatgggagatgttggtattttatgtgtataaaagcaacaatatcagcaacttcgtgtttatactgcaccttggttgttgatgtcaagtaaaaaaaagattgttttgtaacacataaaaaaatggaagaaactgataccacacctaaggaccaaagataagaaagactttttgcccaagacagtgaaagtaattataaaaacaagctttgaccacttaccaagtatctgaagagatgagttcatactatgatttagaaagtggttcaattcccctgttggcatatgattatttttactaaaattaatacagctctgtgggtcttccttagtgttttctttgaagccaatctgttttttttaggacaccagcctttggtttttcatctgttcgagatgcctcttctctgtctccttatcagatagaaatggagtcatgtgctgctgcttcatctagcagaggttggcctctggctctgacactttttgtcagttgtctttaggtggtcctgaatcttgggcccttttgattgtgaatactgtgtagcaggatcttgagagtccttgttcttacataggcattgctctagtttgtctttggcaaaaaaaaaaaaaaaaaaaaaaaaaaaa

SEQ ID NO: 102 - DNA, 875 bp, Homo sapiens
caagtactccaacaaaaagagagattatgctaacaccagtgactgtggcttatagtccaaagcgatcccctaaagaaaacttgtccccaggatttagtcatctgcttagcaaaaatgagagcagtccaattcgatttgatatacttttggatgatttagatactgttcctgtgtctacattacaacgtaccaatccaagaaagcaactccagtttcttcctctagatgactcggaagaaaaaacttattctgagaaagccaccgataaccatgttaatcatagctcttgccctgaaccggtgccaaatggagtgaagaaagtatctgtgagaacagcctgggagaagaataaatcagttagctacgaacagtgtaagccggtttcagtcactccacaggggaatgattttgaatatacagcaaaaattcggaccctagctgaaacagaacgattttttgatgaacttacaaaagaaaaggaccagattgaggcagcactaagcaggatgccttctcctggaggacgaatcactttacagacaagattaaatcagacccctcagatatgtgaggaatcaagccataaatgtgcatttgctggacattatgtaccatgtcatctctatgactacagatttcaaggataatttttacatctaacaatttcactgtaacagtgaccgataatgtgagaaatgtgctttttacagtgctgctggtgggtagacaagtgcttgctgcagttgtttctgaatctagccagatgctggagtcgtgaagctgtaagctccgcgggagcagggaccatctctctttcttgcactacaggcactcaataaatacttgtggctgtgaaaaaaaaaaaaaaaaaaaaa

SEQ ID NO: 103 - DNA, 654 bp, Homo sapiens
gcagatggtaggaaatggagacggagaaatggcactaatggcccagccacctgagatgggatacctgggagggacatcttttcaagtagaggctgtgttggggcatggtgagagagggtcttagcaggtaaccttcctttcctctccagactgaggaatcagagttctgattgtggagtgcctctctctaggacggggctgcagcataggagtctcagctgcttacatccaggtccaggattatgtctgctaacagacgctggtgggtaccacctgacgacgaagactgtgtgtctgagaagctcctgaggaagactcgggaatctccactggtgcctataggcttaggaggctgcttggtggtagcagcatacaggatttaccggctgaggtctcgtggttccaccaagatgtccatacacctgattcacacccgagtggcagcgcaggcctgtgcagtgggtgcaatcatgctaggtgctgtgtacacaatgtacagcgattacgtcaagaggatggcacaggatgctggagagaagtaggactcctataggagccggggctgtccaactcccctaactcaatccctggtacattcctaataaagcagttttgaggaaaaacaaaaaaaaaaaaaaaaaaaaaaaaaaaaaa

SEQ ID NO: 104 - DNA, 1433 bp, Homo sapiens
gggaggtaagtagaaaccgttgatgggactgagaaaccagagttaaaacctctttggagcttctgagggctcagctggaaccaacgggcacagttggcaacaccatcatgacatcacaacctgttcccaatgagaccatcatagtgctcccatcaaatgtcatcaacttctcccaagcagagaaacccgaacccaccaaccaggggcaggatagcctgaagaaacatctacacgcagaaatcaaagttattgggactatccagatcttgtgtggcatgatggtattgagcttggggatcattttggcatctgcttccttctctccaaattttacccaagtgacttctacactgttgaactctgcttacccattcataggaccctttttttttatcatctctggctctctatcaatcgccacagagaaaaggttgaccaagcttttggtgcatagcagcctggttggaagcattctgagtgctctgtctgccctggtgggtttcattatcctgtctgtcaaacaggccaccttaaatcctgcctcactgcagtgtgagttggacaaaaataatataccaacaagaagttatgtttcttacttttatcatgattcactttataccacggactgctatacagccaaagccagtctggctggatccctctctctgatgctgatttgcactctgctggaattctgcctagctgtgctcactgctgtgctgcggtggaaacaggcttactctgacttccctgggagtgtacttttcctgcctcacagttacattggtaattctggcatgtcctcaaaaatgactcatgactgtggatatgaagaactattgacttcttaagaaaaaagggagaaatattaatcagaaagttgattcttatgataatatggaaaagttaaccattatagaaaagcaaagcttgagtttcctaaatgtaagcttttaaagtaatgaacattaaaaaaaaccattatttcactgtcatttaagatatgtgttcattggggatctcttgatttgcctgacattgacttcagcaaaagcacggggctgtaaattaccatttactagattagccaaatagtctgaatttccagaaaacaaggcagaatgatcattcccagaaacatttcccagaaaatgtttcccagaaaactagacagaatgatcattcaatggatcacagtgaagcaaaggacacaactttttattgtaccccttaattgtcaacaggagttaactgatttgttgtggtgctcagacttttttatacaggtgctagtgttttatcctatgtattttaactcattagtgcataaaggcaagccccatataatgaagtctcagggtatatgaaagtagctggcttcaaaataaaatttttgagtgcaaaaaaaaaaaaaaaaaaaaaaaaaaaaa

SEQ ID NO: 105 - DNA, 1200 bp, Homo sapiens
atggccgagctgctgcggagcctgcaggattcccagctcgtcgcccgcttccagcgccgctgcgggctcttccccgctccggatgaaggcccccgggagaacggcgcggaccccacggagcgcgcggcgcgggtccccggggtcgagcatctccccgcagccaacggcaagggcggcgaggctccggccaacgggctgcgcagagccgcggcgccggaggcttatgtacagaagtacgtcgtgaagaattatttctactattacctattccaattttcagctgctttgggccaagaagtgttctacatcacgtttcttccattcactcactggaatattgacccttatttatccagaagattgatcatcatatgggttttggtgatgtatattggccaagtggccaaggatgtcttgaagtggccccgtccctcctcccctccagttgtaaaactggaaaagagactgatcgctgaatatggaatgccatccacccacgccatggcggccactgccattgccttcaccctccttatctctactatggacagataccagtatccatttgtgttgggactggtgatggccgtggtgttttccaccttggtgtgtctcagcaggctctacactgggatgcatacggtcctggatgtgctgggtggcgtcctgatcaccgcactcctcatcgtcctcacctaccctgcctggaccttcatcgactgcctggactcggccagccccctcttccccgtgtgtgtcatagttgtgccattcttcctgtgttacaattaccctgtttctgattactacagcccaacccgggcggacaccaccaccattctggctgccggggctggagtgaccataggattctggatcaaccatttcttccagcttgtatccaagcccgctgaatctctccctgttattcagaacatcccaccactcaccacctacatgttagttttgggtctgaccaaatttgcagtgggaattgtgttgatcctcttggttcgtcagcttgtacaaaatctctcactgcaagtattatactcatggttcaaggtggtcaccaggaacaaggaggccaggcggagactggagattgaagtgccttacaagtttgttacctacacatctgttggcatctgcgctacaacctttgtgccgatgcttcacaggtttctgggattaccctga

SEQ ID NO: 106 - DNA, 2141 bp, Homo sapiens
ggctgaggagctgcccagagcaccgctcacactcccagagtacctgaagtcggcatttcaatgacaggtgacaagggtccccaaaggctaagcgggtccagctatggttccatctccagcccgaccagcccgaccagcccagggccacagcaagcacctcccagagagacctacctgagtgagaagatccccatcccagacacaaaaccgggcaccttcagcctgcggaagctatgggccttcacggggcctggctttctcatgagcattgctttcctggacccaggaaacatcgagtcagatcttcaggctggcgccgtggcgggattcaaacttctctgggtgctgctctgggccaccgtgttgggcttgctctgccagcgactggctgcacgtctgggcgtggtgacaggcaaggacttgggcgaggtctgccatctctactaccctaagtcggagtctcgctccgtcgcccagtcaggagtgcaatggtgcgatgtcagctcactgcaacctctacctcccaggtgccccgcaccgtcctctggctgaccatcgagctagccattgtgggctccgacatgcaggaagtcatcggcacggccattgcattcaatctgctctcagctggacgaatcccactctggggtggcgtcctcatcaccatcgtggacaccttcttcttcctcttcctcgataactacgggctgcggaagctggaagctttttttggactccttataaccattatggccttgacctttggctatgagtatgtggtggcgcgtcctgagcagggagcgcttcttcggggcctgttcctgccctcgtgcccgggctgcggccaccccgagctgctgcaggcggtgggcattgttggcgccatcatcatgccccacaacatctacctgcactcggccctggtcaagtctcgagagatagaccgggcccgccgagcggacatcagagaagccaacatgtacttcctgattgaggccaccatcgccctgtccgtctcctttatcatcaacctctttgtcatggctgtctttgggcaggccttctaccagaaaaccaaccaggctgcgttcaacatctgtgccaacagcagcctccacgactacgccaagatcttccccatgaacaacgccaccgtggccgtggacatttaccaggggggcgtgatcctgggctgcctgttcggccccgcggccctctacatctgggccataggtctcctggcggctgggcagagctccaccatgacgggcacctacgcgggacagttcgtgatggagggcttcctgaggctgcggtggtcacgcttcgcccgtgtcctcctcacccgctcctgcgccatcctgcccaccgtgctcgtggctgtcttccgggacctgagggacttgtcgggcctcaatgatctgctcaacgtgctgcagagcctgctgctcccgttcgccgtgctgcccatcctcacgttcaccagcatgcccaccctcatgcaggagtttgccaatggcctgctgaacaaggtcgtcacctcttccatcatggtgctagtctgcgccatcaacctctacttcgtggtcagctatctgcccagcctgccccaccctgcctacttcggccttgcagccttgctggccgcagcctacctgggcctcagcacctacctggtctggacctgttgccttgcccacggagccacctttctggcccacagctcccaccaccacttcctgtatgggctccttgaagaggaccagaaaggggagacctctggctaggcccacaccagggcctggctgggagtggcatgtatgacgtgactggcctgctggatgtggagggggcgcgtgcaggcagcaggatggagtgggacagttcctgagaccagccaacctgggggctttagggacctgctgtttcctagcgcagccatgtgattaccctctgggtctcagtgtcctcatctgtaaaatggagacaccaccacccttgccatggaggttaagcactttaacacagtgtctggcacttgggacaaaaacaaacaaacaaacaaaaaacaaaaaaaaaaaaaaaaaaaaaaaaaaaaaaaaaaaaaaaaaaaaaaaaaaaaaaaaaaaaaaaaaaaaaaa

SEQ ID NO: 107 - DNA, 2730 bp, Homo sapiens
ggggcgagcgggaaagcggcagcggcggcggcggcggcggcggcgggggaaggatgcaggggaagaagccgggcggttcgtcgggcggcggccggagcggcgagctgcagggggacgaggcgcagaggaacaagaaaaagaaaaagaaggtgtcctgcttttccaacatcaagatcttccttgtgtccgagtgcgccctgatgctggcgcagggcacggtgggcgcctacctggtgagcgtcctgaccaccctggagcgtaggttcaacctgcagagcgctgacgtgggtgtgatcgctagcagcttcgagatcgggaacctggcgctcatcctcttcgtgagctacttcggggcacgcgggcaccggccgcgcctgatcggctgcggcggcatcgtcatggcgctgggcgcgctgctgtcggcgctgcccgagttcctgacccaccagtacaagtacgaggcgggcgagatccgctggggcgccgagggccgcgacgtctgcgcagccaacggctcgggcggcgacgaggggcccgaccccgacctcatctgcctcaaccggacggctaccaacatgatgtacttgctgctcattggggcccaggtgctcctgggcatcggtgctacccctgtgcagcccctgggcgtctcctacatcgacgaccacgtgcggaggaaggactcctcgctctatataggaatcctgttcacgatgctggtatttggaccagcctgcgggtttatcctgggctctttctgtaccaaaatctacgtggatgcagtcttcattgacacaagtaacctggacatcactccggacgacccccgctggatcggagcctggtggggtggctttctgctctgcggtgccttactcttcttctcttccctcttgatgtttgggtttccacagtccctgcccccgcactcagaccccgccatggaaagcgagcaggccatgctctccgaaagagaatacgagagacccaagcccagcaacggggtcctgaggcaccccctggagccagacagcagtgcctcctgtttccagcagctgagagtgatcccgaaggtcaccaagcacctgctctcaaaccctgtgttcacctgcatcatcctggccgcctgcatggagattgcagtggtggctggcttcgctgcctttttggggaagtacctggagcagcagtttaacctcaccacctcttctgccaaccagctgcttgggatgactgcgatcccgtgtgcttgtctgggtatcttcctgggaggtcttttggtgaagaagctcagcctgtctgccctgggggccattcggatggccatgctcgtcaacctggtgtccactgcttgctacgtctccttcctcttcctgggctgcgacactggccctgtggctggggttactgttccctatggaaacagcacagcacctggctcagccctggacccctactcgccctgcaataataactgtgaatgccaaaccgattccttcactccagtgtgtggggcagatggcatcacctacctgtctgcctgctttgctggctgcaacagcacgaatctcacgggctgtgcgtgcctcaccaccgtccctgctgagaacgcaaccgtggttcctggaaaatgccccagtcctgggtgccaagaggccttcctcactttcctctgtgtgatgtgtatctgcagcctgatcggtgccatggcacagacaccctcagtcatcatcctcatcaggacagtcagccctgaactcaagtcttacgctttgggagttctttttctcctccttcgtttgttgggcttcatccctccacccctcatcttcggggctggcatcgactccacctgcctgttctggagcacgttctgtggggagcaaggcgcctgcgtcctctacgacaatgtggtctaccgatacctgtatgtcagcatcgccatcgcgctcaaatccttcgccttcatcctgtacaccaccacgtggcagtgcctgaggaaaaactataaacgctacatcaaaaaccacgagggcgggctgagcaccagcacagagtaccaagacattgagactgagaaaacctgccccgaatcacattcaccttcagaagactcctttgtgagaagctgagggcctggccctcttcctcttcctggagagaacagccctccaccacccacagacctcgcgggcctcacttagcgtgctcctccctgtccgagaacccgagggtccccatgtggattatccagccagtgtgtggtcctttgaggccccaagcgcaggcctgtgatgaggaccaaagaggtgacttatggtcaggagtactccaaacagctctcagagtaggcatctttcctgggtctctaaagagtcatgctgacctggtgtgcaaattcccttccacccatccctctacctcctctggggatggcttgccgacatgctttagaaactcccctcttgggaatgctcctctgactgagggctccaacagctttaatgaaatcagccgagagggtaaaaaccaacctgttgcatagaatggaggggggaaaaagcacatactcaatagatttttgagtgtggtactctgtatttttgcagcgtttattttccaaatgagcagtttagaaatatgtgatgtaaagtacatactgtacgtttgctgaaaattatattaaaagcactattttaattcttaaaaaaaaaaaaaaaaaaaaaaaaa

SEQ ID NO: 108 - DNA, 2031 bp, Homo sapiens
gagcgcgcgcgccgccgccgttgccgccgggctgagagaagagcttgcggggtttgcggttgatggccccgactgaagggctggaggcggtgtatgccgctgttcttgctgtcgctcccgacacctccgtccgcttctggtcatgagaggagacagaggcctgaagcaaagacatctgggtcagagaaaaagtatttaagggccatgcaagccaatcgtagccaactgcacagtcctccaggaactggaagcagtgaggatgcctcaacccctcagtgtgtccacacaagattgacaggagagggttcttgccctcattctggagatgttcatatccagataaactccatacctaaagaatgtgcagaaaatgcaagctccagaaatataaggtcaggtgtccatagctgtgcccatggatgtgtacacagtcgcttacggggtcactcccacagtgaagcaaggctgactgatgatactgccgcagaatctggagatcatggtagtagctccttctcagaattccgctatctcttcaagtggctgcaaaaaagtcttccatatattttgattctgagcgtcaaacttgttatgcagcatataacaggaatttctcttggaattgggctgctaacaacttttatgtatgcaaacaaaagcattgtaaatcaggtttttctaagagaaaggtcctcaaagattcagtgtgcttggttactggtattcttagcaggatcttctgttcttttatattacacctttcattctcagtcactttattacagcttaatttttttaaatcctactttggaccatttgagcttctgggaagtattttggattgttggaattacagacttcattctgaaattctttttcatgggcttaaaatgccttattttattggtgccttctttcatcatgccttttaaatctaagggttactggtatatgcttttagaagaattgtgtcaatactaccgaacttttgttcccataccagtttggtttcgctaccttataagctatggggagtttggtaacgtaactagatggagtcttgggatactgctggctttactctacctcatattaaaacttttggaattttttgggcatctgagaactttcagacaggttttacgaatattttttacacaaccaagttatggagtggctgccagcaagagacagtgttcagatgtggatgatatttgttcaatatgtcaagctgaatttcagaagccaattcttctcatttgtcagcatatattttgtgaagagtgcatgaccttatggtttaacagagagaaaacatgtccactctgcagaactgtgatttcagaccatataaacaaatggaaggatggagccacttcatcacaccttcaaatatattaagttgtataaactatcaaggccacaaaatactaatgtcatttggtcataatgactactgataaggcatcagaatggattttcagggctaccagaaaaatgtttccagatggttttagaatgtaggacttatgatccaattcaccaaaagattaaatgaaaccaccctgtgttttaaaatatatataatgttcaacctaatgtatatgcaacatttattctattctaattatttgacaggtaactgcagtgttaaattgtaaatgtgttttctttatgttaccaaaacagcaatttgaaattagaactagtggttttagagaactcaggtattctttcctgacattgttttcagaataaagaatatttttcataatattttaagatacatactatctaaaagtagaattttgttcagcattgacttttataattcccatcctaaaaattcttaatattttcataaaatttgtatttttaaatgaaaattctaaatgttgtattttatcagtaacattttctaagtgaagattaatttactgaggatgatacattatagtattgtattattctctgtagtaagattagtaataagtgaaaataaatgatttaaattcaaaaaaaaaaaaaaaa

SEQ ID NO: 109 - DNA, 1721 bp, Homo sapiens
gggttccaaatctcacaagcctctttgtatgtgatgctctcgcagtgaagaagattctttgggctataaagatgaagagtctacttcttctggtgctgatttcaatctgctgggctgatcatctttcagacaactatactctggatcatgacagagctattcacatccaagcagaaaatggcccccatctacttgtggaagcagagcaagccaaggtgttttcacacagaggtggcaatgttacactgccatgtaaattttatcgagaccctacagcatttggctcaggaatccataaaatccgaattaagtggaccaagctaacttcggattacctcaaggaagtggatgtttttgtttccatgggataccacaaaaaaacctatggaggctaccagggtagagtgtttctgaagggaggcagtgatagtgatgcttctctggtcatcacagacctcactctggaagattatgggagatataagtgtgaggtgattgaaggattagaagatgatactgttgtggtagcactggacttacaaggtgtggtattcccttactttccacgactggggcgctacaatctcaattttcacgaggcgcagcaggcgtgtctggaccaggatgctgtgatcgcctccttcgaccagctgtacgacgcctggcggggcgggctggactggtgcaatgccggctggctcagtgatggctctgtgcaatatcccatcacaaagcccagagagccctgtgggggccagaacacagtgcccggagtcaggaactacggattttgggataaagataaaagcagatatgatgttttctgttttacatccaatttcaatggccgtttttactatctgatccaccccaccaaactgacctatgatgtagcggtgcaagcttgtctcaatgatggtgctcagattgcaaaagtgggccagatatttgctgcctggaaaattctcggatatgaccgctgtgatgcgggctggttggcggatggcagcgtccgctaccccatctctaggccaagaaggcgctgcagtcctactgaggctgcagtgcgcttcgtgggtttcccagataaaaagcataagctgtatggtgtctactgcttcagagcatacaactgaatgtgcccttagagcgcatcagttttaaagtcattaagaacatgtgaaaggtgttttttttttccaatatgaactcatgcaagttaccaaaactgtgataacccttttttacttactgtaaagagtcattttcataaagatcaattcattgatttgttttttgtaaagctatcattcaatatatattataaattaatataaatttaagggaagctctatgtaaggagacttagagccaaactgtttaagctgtatcatcccaacaaagtatcctttcatgaacggggcatgcaatagcttaagaattgctaggattaaattaaggaaagtaaagctactcagagcagcaggttccacaagcacaaactttacacatttgtacaattttgaaatgcactacaataaacaaattagagcaacacatttgaaatacaggcttctttacataaactgagaggttatacaaaactcagtttcacaagggaacaatctatacctttctaaaagttaatatttcaagtctctaataggcagaatattttactctttaaaatcctgcctttctgaccgaaaaaaaaaaaaaaa

SEQ ID NO: 110 - DNA, 9645 bp, Homo sapiens; identical to SEQ ID NO: 2

SEQ ID NO: 111 - DNA, 3070 bp, Homo sapiens
gagcccagagccagagagcgcgctgggcggtgctgggcacccgcggagtggaacggggctggtggaatgcacagggtcgcagcgcttgggccaccctcggtcagagggcgccgtgtccagcgagcaaacgggcgccccggagccttgctgagaggcagctctgggctttcccagctccgaagtcaatactgagatcccagatgtgtccagagacatcctgaagaggctcgggggtggaggagccttagtgtgtccacaaagggactcctgaaactgactgagagccagtggatttgccagcagtctgagcttctaccgagtcttcccccacctcaatccctgttgctatggagactaccaatggaacggagacctggtatgagagcctgcatgccgtgctgaaggctctaaatgccactcttcacagcaatttgctctgccggccagggccagggctggggccagacaaccagactgaagagaggcgggccagcctacctggccgtgatgacaactcctacatgtacattctctttgtcatgtttctatttgctgtaactgtgggcagcctcatcctgggatacacccgctcccgcaaagtggacaagcgtagtgacccctatcatgtgtatatcaagaaccgtgtgtctatgatctaacacgagagggctgggacggtggaagaccaagacacctggggattgcgtctggggcctccagaactctgctgtggactgcatcaggtctcagtgtccctatctgtaagatcaacaagaaacacggttaagggaggtcgtcactggggtgggagaagaggggctggtagaccgaagccttgtgcataaggattttttcccaggaaaagatagactttataaacagtgggagcccatgaacaaacatataaaagtagcaacagataatgaccaataactggttcagtggctggagtattaggggcctggggattggagaacggagaagaagttgtagcagagggaaatgagacaggaagatgctctggggacacattttttatgtgttatcttcagccatgagaagcagtgatgactatcccatatcacagatatgatttaccaccaccaccctgcccccgctcccgtgaagaaagcagggcaagtgctgtgctgcccatttgggcctgcatagtgccatgattggaacccaggaactctggtctccttgcctagtgcttttcaaaactctgtgctacacaggagtggatccaggcctgaaggtcatacaattctggggactctctttaagaaaaagaattctaaaatatcttacttttgcaaacattatgaaaatatactgccacattaatatgttgctagggcccctgctaggaccttaagaaggagctcatgtgagtcaggaccctgaatgttaggcctcgttagctctatggttcatatgcttcttgaaccaagtcacagggcacttcccagccacattgccaggcaacaggactaaactacctccaaagcaagcagtcttttcagttttgactgagtgatgtgagaaacttcttttcttttcttttctttttttttttttgagacagtctccctatgtcacccaggctgtggtgcagcaacccaatcttggctcactgcaacccccacctcccgggttcaagcaattatcctgcctcagccacctgagtagctgggattacaggttcctgtcaccacacccagttaatttatatatatatatatatatatatatttaagtagagacagggtttcacatgttgcccaggctggtctcgaactcctgtcctcaagttatctgcccattttggtctcccaaagtgctgggattacaagtgtaagccaccacgactatctgagagaagttttctgatgtcatgttgaatctgcttctaaaagactgatactgccaaggtgggcggatcacctgaggtcaggagttcgagaccagcctggccaacatggtgaaaccccatctactaaaaaaatacaaaaattagccagacctggtggcgggtgcccgtattcccagctacttgggaggctgaggcaggagaattgtttgaacccgggaggtggaggttgcagtaagccaagatcacgccactgcactccagcctgggtgacagagcaaggctctgtctcaaaaaaaaacaaaaacaaaaacaaaaaagactgatatcgcacctaaattattattatattaaaagaagcagagtatgagagacaggtacatggtccagtaggaagagaagcagccctgattctaccacttaaggtgatgtatgatcttaggctggacacttctctccctcatccgttttcctcttcaacataatgaaatagacttgaaagtctctaaggctctatcagttctgacattctaggcttcatatacattaagttgagccatatgtaatcactgtgtttgtaggttagaaacagctgagtatcgtagtttcatatatggttccagctaatacatgcaatgtggctggtgaacacttctgaattcagaaactatcccagatctcagctagaaccatccactgttctgtttgtccagtttcaacttaagggatctccatgcggtccctggaagtacccattgaaacatgcgtatttgtgtatagcagaactctgaaataatattctgacagcagttatctctgaggaattgggttataggtgattttccctttccgcatgataaatttatgtaatatttgactgacttgaccgtaagtatgttacttgtataataaaaggaaaaaaggtacttctattttgaaaaaataaaaataaaagcctttgggttcttgaatggaggatcatggaacacatttgctgccatatgcagttatgttgatgctctgcaaacctgtgctgagccctgttgctcaagcccttcctcatctcttcttgagggagaaggtggagacttccttaaggagatgtgacatatgggaagacaacagattcagaaatttacgtggataggactttagacaccacccagcccaaacttccaaataaaatatggaacgcaa

SEQ ID NO: 112 - DNA, 2181 bp, Homo sapiens
gcgcggcggagctggaactgctgcagctgctgccgccgccggaggaaccttgatccccgtgctccggacaccccgggcctcgccatggctgaccagctgactgaggagcagattgcagagttcaaggaggccttctccctctttgacaaggatggagatggcactatcaccaccaaggagttggggacagtgatgagatccctgggacagaaccccactgaagcagagctgcaggatatgatcaatgaggtggatgcagatgggaacgggaccattgacttcccggagttcctgaccatgatggccagaaagatgaaggacacagacagtgaggaggagatccgagaggcgttccgtgtctttgacaaggatgggaatggctacatcagcgccgcagagctgcgtcacgtaatgacgaacctgggggagaagctgaccgatgaggaggtggatgagatgatcagggaggctgacatcgatggagatggccaggtcaattatgaagagtttgtacagatgatgactgcaaagtgaaggccccccgggcagctggcgatgcccgttctcttgatctctctcttctcgcgcgcgcactctctcttcaacactcccctgcgtaccccggttctagcaaacaccaattgattgactgagaatctgataaagcaacaaaagatttgtcccaagctgcatgattgctctttctccttcttccctgagtctctctccatgcccctcatctcttccttttgccctcgcctcttccatccatgtcttccaaggcctgatgcattcataagttgaagccctccccagatccccttggggagcctctgccctcctccagcccggatggctctcctccattttggtttgtttcctcttgtttgtcatcttattttgggtgctggggtggctgccagccctgtcccgggacctgctgggagggacaagaggccctcccccaggcagaagagcatgccctttgccgttgcatgcaaccagccctgtgattccacgtgcagatcccagcagcctgttggggcaggggtgccaagagaggcattccagaaggactgagggggcgttgaggaattgtggcgttgactggatgtggcccaggagggggtcgagggggccaactcacagaaggggactgacagtgggcaacactcacatcccactggctgctgttctgaaaccatctgattggctttctgaggtttggctgggtggggactgctcatttggccactctgcagattggacttgcccgcgttcctgaagcgctctcgagctgttctgtaaatacctggtgctaacatcccatgccgctccctcctcacgatgcacccaccgccctgagggcccgtcctaggaatggatgtggggatggtcgctttgtaatgtgctggttctctttttttttctttcccctctatggcccttaagactttcattttgttcagaaccatgctgggctagctaaagggtggggagagggaagatgggccccaccacgctctcaagagaacgcacctgcaataaaacagtcttgtcggccagctgcccaggggacggcagctacagcagcctctgcgtcctggtccgccagcacctcccgcttctccgtggtgacttggcgccgcttcctcacatctgtgctccgtgccctcttccctgcctcttccctcgcccacctgcctgcccccatactcccccagcggagagcatgatccgtgcccttgcttctgactttcgcctctgggacaagtaagtcaatgtgggcagttcagtcgtctgggttttttccccttttctgttcatttcatctggctccccccaccacctccccaccccaccccccaccccctgcttcccctcactgcccaggtcgatcaagtggcttttcctgggacctgcccagctttgagaatctcttctcatccaccctctggcacccagcctctgagggaaggagggatggggcatagtgggagacccagccaagagctgagggtaaggtcaggtaggcgtgaggctgtggacattttcggaatgttttggttttgttttttttaaaccgggcaatattgtgttcagttcaagctgtgaagaaaaatatatatcaatgttttccaataaaatacagtgactacctgaaaaaaaaaaaaaaaaaaa

SEQ ID NO: 113 - DNA, 1204 bp, Homo sapiens
agcagaagaaccctcttggactggacgatttgggaattcaaaacttgggacaaactgtcagccttgcccctgctgtggaggcagcctcaatgctgaaaatggagcctctgaacagcacgcaccccggcaccgccgcctccagcagccccctggagtcccgtgcggccggtggcggcagcggcaatggcaacgagtacttctacattctggttgtcatgtccttctacggcattttcttgatcggaatcatgctgggctacatgaaatccaagaggcgggagaagaagtccagcctcctgctgctgtacaaagacgaggagcggctctggggggaggccatgaagccgctgcccgtggtgtcgggcctgaggtcggtgcaggtgcccctgatgctgaacatgctgcaggagagcgtggcgcccgcgctgtcctgcaccctctgttccatggaaggggacagcgtgagctccgagtcctcctccccggacgtgcacctcaccattcaggaggagggggcagacgaggagctggaggagacctcggagacgcccctcaacgagagcagcgaagggtcctcggagaacatccatcagaattcctagcacccccgggacccctgcgggtggctccatcagccagcaaccttagagagaggaaagacagttttcaagtgtctggtttcactttcacagtgcggctgccactttgaagagacccttggtaaacccctgattcggggtggggtgggggactaggctcagccggaaccagcacctccaaggagtccgggaggtgcctgtggtttgcacccaccactgaaaaagccgcggagatgcgcagcgcgtacactgactttggggcctgggtgttggggttctgatcagaatttggcgggatgatatgcttgccattttctcactggatgccctgggtagctcctgcagggtctgcctgttcccagggctgccgaatgcttaggacacgctgagagactagttgtgatttgctattttgcctagagctttgtccttctagatctgattggctgtaagtatctctactgtgtacctgtggcattccttcacagtgggttacaagcttcttttggattagagggggatttttgatgggagaaagctggagatctgaacccagcccatttgcacactaaaaaaaaaaaaaaaaaaaaaaaaaaaaaaaaaaa

SEQ ID NO: 114 - DNA, 1652 bp, Homo sapiens
agcagctgcagtcggaaaaatcagagaaagcgtcacccagccccagattccgaggggcctgccagggactctctcctcctgctccttggaaaggaagaccccgaaagacccccaagccaccggctcagacctgcttctgggctgccatgggacttgcggccaccgccccccggctgtcctccacgctgccgggcagataagggcagctgctgcccttggggcacctgctcactcccgcagcccagccactcctccagggccagcccttccctgactgagtgaccacctctgctgccccgaggccatgtaggccgtgcttaggcctctgtggacacactgctggggacggcgcctgagctctcagggggacgaggaacaccaccatgccccggggcttcacctggctgcgctatcttgggatcttccttggcgtggccttggggaatgagcctttggagatgtggcccttgacgcagaatgaggagtgcactgtcacgggttttctgcgggacaagctgcagtacaggagccgacttcagtacatgaaacactacttccccatcaactacaagatcagtgtgccttacgagggggtgttcagaatcgccaacgtcaccaggctgcagagggcccaggtgagcgagcgggagctgcggtatctgtgggtcttggtgagcctcagtgccactgagtcggtgcaggacgtgctgctcgagggccacccatcctggaagtacctgcaggaggtgcagacgctgctgctgaatgtccagcagggcctcacggatgtggaggtcagccccaaggtggaatccgtgttgtccctcttgaatgccccagggccaaacctgaagctggtgcggcccaaagccctgctggacaactgcttccgggtcatggagctgctgtactgctcctgctgtaaacaaagctccgtcctaaactggcaggactgtgaggtgccaagtcctcagtcttgcagcccagagccctcattgcagtatgcggccacccagctgtaccctccgcccccgtggtcccccagctccccgcctcactccacgggctcggtgaggccggtcagggcacagggcgagggcctcttgccctgagcaccctggatggtgactgcggataggggcagccagaccagctcccacaggagttcaactgggtctgagacttcaaggggtggtggtgggagccccccttgggagaggacccctgggaagggtgtttttcctttgagggggattctgtgccacagcagggctcagcttcctgccttccatagctgtcatggcctcacctggagcggaggggacctggggacctgaaggtggatggggacacagctcctggcttctcctggtgctgccctcactgtccccccgcctaaagggggtactgagcctcctgtggcccgcagcagtgagggcacagctgtgggttgcaggggagacagccagcacggcgtggccattctatgaccccccagcctggcagactggggagctgggggcagagggcggtgccaagtgccacatcttgccatagtggatgctcttccagtttcttttttctattaaacaccccacttcctttgaaaaaaaaaaaaaaaaaaaaaaaaaaaaaaaaaaaaaaaaaaaaaa

SEQ ID NO: 115 - DNA, 1182 bp, Homo sapiens
acctctcaagcagccagcgcctgcctgaatctgttctgccccctccccacccatttcaccaccaccatgacaccgggcacccagtctcctttcttcctgctgctgctcctcacagtgcttacagctaccacagcccctaaacccgcaacagttgttacgggttctggtcatgcaagctctaccccaggtggagaaaaggagacttcggctacccagagaagttcagtgcccagctctactgagaagaatgcttttaattcctctctggaagatcccagcaccgactactaccaagagctgcagagagacatttctgaaatgtttttgcagatttataaacaagggggttttctgggcctctccaatattaagttcaggccaggatctgtggtggtacaattgactctggccttccgagaaggtaccatcaatgtccacgacgtggagacacagttcaatcagtataaaacggaagcagcctctcgatataacctgacgatctcagacgtcagcgtgagtgatgtgccatttcctttctctgcccagtctggggctggggtgccaggctggggcatcgcgctgctggtgctggtctgtgttctggttgcgctggccattgtctatctcattgccttggctgtctgtcagtgccgccgaaagaactacgggcagctggacatctttccagcccgggatacctaccatcctatgagcgagtaccccacctaccacacccatgggcgctatgtgccccctagcagtaccgatcgtagcccctatgagaaggtttctgcaggtaatggtggcagcagcctctcttacacaaacccagcagtggcagccacttctgccaacttgtaggggcacgtcgcccgctgagctgagtggccagccagtgccattccactccactcaggttcttcagggccagagcccctgcaccctgtttgggctggtgagctgggagttcaggtgggctgctcacagcctccttcagaggccccaccaatttctcggacacttctcagtgtgtggaagctcatgtgggcccctgagggctcatgcctgggaagtgttgtggtgggggctcccaggaggactggcccagagagccctgagatagcggggatcctgaactggactgaataaaacgtggtctcccactgcgccaaaaaaaaaaaa

SEQ ID NO: 116 - DNA, 3309 bp, Homo sapiens
ttcagcccctctcccgggctgcgcctccgcactccgggcccgggcagaagggggtgcgcctcggccccaccacccagggagcagccgagctgaaaggccgggaaccgcggcttgcggggaccacagctcccgaaagcgacgttcggccaccggaggagcgggagccaagcaggcggagctcggcgggagaggtgcgggccgaatccgagccgagcggagaggaatccggcagtagagagcggactccagccggcggaccctgcagccctcgcctgggacagcggcgcgctgggcaggcgcccaagagagcatcgagcagcggaacccgcgaagccggcccgcagccgcgacccgcgcagcctgccgctctcccgccgccggtccgggcagcatgaggcgcgcggcgctctggctctggctgtgcgcgctggcgctgagcctgcagccggccctgccgcaaattgtggctactaatttgccccctgaagatcaagatggctctggggatgactctgacaacttctccggctcaggtgcaggtgctttgcaagatatcaccttgtcacagcagaccccctccacttggaaggacacgcagctcctgacggctattcccacgtctccagaacccaccggcctggaggctacagctgcctccacctccaccctgccggctggagaggggcccaaggagggagaggctgtagtcctgccagaagtggagcctggcctcaccgcccgggagcaggaggccaccccccgacccagggagaccacacagctcccgaccactcatcaggcctcaacgaccacagccaccacggcccaggagcccgccacctcccacccccacagggacatgcagcctggccaccatgagacctcaacccctgcaggacccagccaagctgaccttcacactccccacacagaggatggaggtccttctgccaccgagagggctgctgaggatggagcctccagtcagctcccagcagcagagggctctggggagcaggacttcacctttgaaacctcgggggagaatacggctgtagtggccgtggagcctgaccgccggaaccagtccccagtggatcagggggccacgggggcctcacagggcctcctggacaggaaagaggtgctgggaggggtcattgccggaggcctcgtggggctcatctttgctgtgtgcctggtgggtttcatgctgtaccgcatgaagaagaaggacgaaggcagctactccttggaggagccgaaacaagccaacggcggggcctaccagaagcccaccaaacaggaggaattctatgcctgacgcgggagccatgcgccccctccgccctgccactcactaggcccccacttgcctcttccttgaagaactgcaggccctggcctcccctgccaccaggccacctccccagcattccagcccctctggtcgctcctgcccacggagtcgtggggtgtgctgggagctccactctgcttctctgacttctgcctggagacttagggcaccaggggtttctcgcataggacctttccaccacagccagcacctggcatcgcaccattctgactcggtttctccaaactgaagcagcctctccccaggtccagctctggaggggagggggatccgactgctttggacctaaatggcctcatgtggctggaagatcctgcgggtggggcttggggctcacacacctgtagcacttactggtaggaccaagcatcttgggggggtggccgctgagtggcaggggacaggagtccactttgtttcgtggggaggtctaatctagatatcgacttgtttttgcacatgtttcctctagttctttgttcatagcccagtagaccttgttacttctgaggtaagttaagtaagttgattcggtatccccccatcttgcttccctaatctatggtcgggagacagcatcagggttaagaagactttttttttttttttttaaactaggagaaccaaatctggaagccaaaatgtaggcttagtttgtgtgttgtctcttgagtttgtcgctcatgtgtgcaacagggtatggactatctgtctggtggccccgtttctggtggtctgttggcaggctggccagtccaggctgccgtggggccgccgcctctttcaagcagtcgtgcctgtgtccatgcgctcagggccatgctgaggcctgggccgctgccacgttggagaagcccgtgtgagaagtgaatgctgggactcagccttcagacagagaggactgtagggagggcggcaggggcctggagatcctcctgcagaccacgcccgtcctgcctgtggcgccgtctccaggggctgcttcctcctggaaattgacgaggggtgtcttgggcagagctggctctgagcgcctccatccaaggccaggttctccgttagctcctgtggccccaccctgggccctgggctggaatcaggaatattttccaaagagtgatagtcttttgcttttggcaaaactctacttaatccaatgggtttttccctgtacagtagattttccaaatgtaataaactttaatataaagtagtcctgtgaatgccactgccttcgcttcttgcctctgtgctgtgtgtgacgtgaccggacttttctgcaaacaccaacatgttgggaaacttggctcgaatctctgtgccttcgtctttcccatggggagggattctggttccagggtccctctgtgtatttgcttttttgttttggctgaaattctcctggaggtcggtaggttcagccaaggttttataaggctgatgtcaatttctgtgttgccaagctccaagccccatcttctaaatggcaaaggaaggtggatggccccagcacagcttgacctgaggctgtggtcacagcggaggtgtggagccgaggcctaccccgcagacaccttggacatcctcctcccacccggctgcagaggccagaggcccccagcccagggctcctgcacttacttgcttatttgacaacgtttcagcgactccgttggccactccgagaggtgggccagtctgtggatcagagatgcaccaccaagccaagggaacctgtgtccggtattcgatactgcgactttctgcctggagtgtatgactgcacatgactcgggggtggggaaaggggtcggctgaccatgctcatctgctggtccgtgggacggtgcccaagccagaggctgggttcatttgtgtaacgacaataaacggtacttgtcatttcgggcaaaaaaaaaaaaaaaaaa

SEQ ID NO: 117 - DNA, 2450 bp, Homo sapiens
agaacggcttccggcgggagctgtgcagctccttatcatggggacaattcatctctttcgaaaaccacaaagatccttttttggcaagttgttacgggaatttagacttgtagcagctgaccgaaggtcctggaagatactgctctttggtgtaataaacttgatatgtactggcttcctgcttatgtggtgcagttctactaatagtatagctttaactgcctatacttacctgaccatttttgatctttttagtttaatgacatgtttaataagttactgggtaacattgaggaaacctagccctgtctattcatttgggtttgaaagattagaagtcctggctgtatttgcctccacagtcttggcacagttgggagctctctttatattaaaagaaagtgcagaacgctttttggaacagcccgagatacacacgggaagattattagttggtacttttgtggctctttgtttcaacctgttcacgatgctttctattcggaataaaccttttgcttatgtctcagaagctgctagtacgagctggcttcaagagcatgttgcagatcttagtcgaagcttgtgtggaattattccgggacttagcagtatcttccttccccgaatgaatccatttgttttgattgatcttgctggagcatttgctctttgtattacatatatgctcattgaaattaataattattttgccgtagacactgcctctgctatagctattgccttgatgacatttggcactatgtatcccatgagtgtgtacagtgggaaagtcttactccagacaacaccaccccatgttattggtcagttggacaaactcatcagagaggtatctaccttagatggagttttagaagtccgaaatgaacatttttggaccctaggttttggctcattggctggatcagtgcatgtaagaattcgacgagatgccaatgaacaaatggttcttgctcatgtgaccaacaggctgtacactctagtgtctactctaactgttcaaattttcaaggatgactggattaggcctgccttattgtctgggcctgttgcagccaatgtcctaaacttttcagatcatcacgtaatcccaatgcctcttttaaagggtactgatgatttgaacccagttacatcaactccagctaaacctagtagtccacctccagaattttcatttaacactcctgggaaaaatgtgaacccagttattcttctaaacacacaaacaaggccttatggttttggtctcaatcatggacacacaccttacagcagcatgcttaatcaaggacttggagttccaggaattggagcaactcaaggattgaggactggttttacaaatataccaagtagatatggaactaataatagaattggacaaccaagaccatgatagactctaacttatttttataaggaatattgactccttggcttccaatttatttagtaatccaactttgcattgactgtttaatcatttactctaaatgttagataatagtagtcttgttcacatttcatgaaacctatgaaactatatttttgtaaaatgtatttgtgacagtgaaatcctcgtaaatgttaaaggctttaaataggcttcctttagaaaatgtgtttctttaaatttggattttggtatctttggttttgtagttgactgcagtgtgatgtgaccttacctttataagagccacttgatggagtagatctgtcacattactaagatacgatatttctttttttttccgagacggagtcttgctctgccactgtgcccggccaatacattattattaacttaaggctgtactttattaaggcttccttagtttttgttttgttttgttttttgagatggagtctcactctgtcgcccaggctggaatgcagtggcatgatctcagctcactgcaacctctgcctcctgagttcaaatgattctcctgcctcagcctcccgagtagctgggattacaggcacctgccaccacgcccagctaatttttgtatttttagtaaagacgggggatttcaccatgttggccaggctggtcttgaactcctgacctcatgatccacccaccttagcctcccaaagtgctgggattaggtgtgagccaccgcacctggccgatattttctttaatgaaatttataaatatgcttcttgaataatacacattttgggaaagggaaaaatgtctgttcaaaaagtaaaggtctcttttatagcttttccaaacttaattgctaaatttttctttgaggttctcctgaattatgtcttacaaactaaaagcaaaaatttttagcagaaattttggaatacattctatctagcacaatttgaatttttaattatcaagatttttgttaaagtttctctcctttaaaaattttagtacatttgtaaat

SEQ ID NO: 118 - DNA, 3273 bp, Homo sapiens
cgctgggcctgcccggaatcccgccgcctgcgccccgcgccccgcgccctgcgggccatgggagccggccgccggcagggacgacgcctgtgagacccgcgagcggcctcggggaccatggggagcgatcgggcccgcaagggcggagggggcccgaaggacttcggcgcgggactcaagtacaactcccggcacgagaaagtgaatggcttggaggaaggcgtggagttcctgccagtcaacaacgtcaagaaggtggaaaagcatggcccggggcgctgggtggtgctggcagccgtgctgatcggcctcctcttggtcttgctggggatcggcttcctggtgtggcatttgcagtaccgggacgtgcgtgtccagaaggtcttcaatggctacatgaggatcacaaatgagaattttgtggatgcctacgagaactccaactccactgagtttgtaagcctggccagcaaggtgaaggacgcgctgaagctgctgtacagcggagtcccattcctgggcccctaccacaaggagtcggctgtgacggccttcagcgagggcagcgtcatcgcctactactggtctgagttcagcatcccgcagcacctggtggaggaggccgagcgcgtcatggccgaggagcgcgtagtcatgctgcccccgcgggcgcgctccctgaagtcctttgtggtcacctcagtggtggctttccccacggactccaaaacagtacagaggacccaggacaacagctgcagctttggcctgcacgcccgcggtgtggagctgatgcgcttcaccacgcccggcttccctgacagcccctaccccgctcatgcccgctgccagtgggccctgcggggggacgccgactcagtgctgagcctcaccttccgcagctttgaccttgcgtcctgcgacgagcgcggcagcgacctggtgacggtgtacaacaccctgagccccatggagccccacgccctggtgcagttgtgtggcacctaccctccctcctacaacctgaccttccactcctcccagaacgtcctgctcatcacactgataaccaacactgagcggcggcatcccggctttgaggccaccttcttccagctgcctaggatgagcagctgtggaggccgcttacgtaaagcccaggggacattcaacagcccctactacccaggccactacccacccaacattgactgcacatggaacattgaggtgcccaacaaccagcatgtgaaggtgcgcttcaaattcttctacctgctggagcccggcgtgcctgcgggcacctgccccaaggactacgtggagatcaatggggagaaatactgcggagagaggtcccagttcgtcgtcaccagcaacagcaacaagatcacagttcgcttccactcagatcagtcctacaccgacaccggcttcttagctgaatacctctcctacgactccagtgacccatgcccggggcagttcacgtgccgcacggggcggtgtatccggaaggagctgcgctgtgatggctgggccgactgcaccgaccacagcgatgagctcaactgcagttgcgacgccggccaccagttcacgtgcaagaacaagttctgcaagcccctcttctgggtctgcgacagtgtgaacgactgcggagacaacagcgacgagcaggggtgcagttgtccggcccagaccttcaggtgttccaatgggaagtgcctctcgaaaagccagcagtgcaatgggaaggacgactgtggggacggctccgacgaggcctcctgccccaaggtgaacgtcgtcacttgtaccaaacacacctaccgctgcctcaatgggctctgcttgagcaagggcaaccctgagtgtgacgggaaggaggactgtagcgacggctcagatgagaaggactgcgactgtgggctgcggtcattcacgagacaggctcgtgttgttgggggcacggatgcggatgagggcgagtggccctggcaggtaagcctgcatgctctgggccagggccacatctgcggtgcttccctcatctctcccaactggctggtctctgccgcacactgctacatcgatgacagaggattcaggtactcagaccccacgcagtggacggccttcctgggcttgcacgaccagagccagcgcagcgcccctggggtgcaggagcgcaggctcaagcgcatcatctcccaccccttcttcaatgacttcaccttcgactatgacatcgcgctgctggagctggagaaaccggcagagtacagctccatggtgcggcccatctgcctgccggacgcctcccatgtcttccctgccggcaaggccatctgggtcacgggctggggacacacccagtatggaggcactggcgcgctgatcctgcaaaagggtgagatccgcgtcatcaaccagaccacctgcgagaacctcctgccgcagcagatcacgccgcgcatgatgtgcgtgggcttcctcagcggcggcgtggactcctgccagggtgattccgggggacccctgtccagcgtggaggcggatgggcggatcttccaggccggtgtggtgagctggggagacggctgcgctcagaggaacaagccaggcgtgtacacaaggctccctctgtttcgggactggatcaaagagaacactggggtataggggccggggccacccaaatgtgtacacctgcggggccacccatcgtccaccccagtgtgcacgcctgcaggctggagactggaccgctgactgcaccagcgcccccagaacatacactgtgaactcaatctccagggctccaaatctgcctagaaaacctctcgcttcctcagcctccaaagtggagctgggaggtagaaggggaggacactggtggttctactgacccaactgggggcaaaggtttgaagacacagcctcccccgccagccccaagctgggccgaggcgcgtttgtgcatatctgcctcccctgtctctaaggagcagcgggaacggagcttcggggcctcctcagtgaaggtggtggggctgccggatctgggctgtggggcccttgggccacgctcttgaggaagcccaggctcggaggaccctggaaaacagacgggtctgagactgaaattgttttaccagctcccagggtggacttcagtgtgtgtatttgtgtaaatgagtaaaacattttatttctttttaaaaaaaaaaaaaaaaaaaaaaaaaaaaaaaaaaaaaaaaaaaaaaaaaa

SEQ ID NO: 119 - DNA, 1410 bp, Homo sapiens
gggcggggctcgggccggtccgcccgcgcgcaggtgagtgagccagggcggagcgcagctgcgccgggcttgggcgcctggggccgccgctccccaccgtcgttttccccaccgaggccgaggcgtcccggagtcatggccggcctgaactgcggggtctctatcgcactgctaggggttctgctgctgggtgcggcgcgcctgccgcgcggggcagaagcttttgagattgctctgccacgagaaagcaacattacagttctcataaagctggggaccccgactctgctggcaaaaccctgttacatcgtcatttctaaaagacatataaccatgttgtccatcaagtctggagaaagaatagtctttacctttagctgccagagtcctgagaatcactttgtcatagagatccagaaaaatattgactgtatgtcaggcccatgtccttttggggaggttcagcttcagccctcgacatcgttgttgcctaccctcaacagaactttcatctgggatgtcaaagctcataagagcatcggtttagagctgcagttttccatccctcgcctgaggcagatcggtccgggtgagagctgcccagacggagtcactcactccatcagcggccgaatcgatgccaccgtggtcaggatcggaaccttctgcagcaatggcactgtgtcccggatcaagatgcaagaaggagtgaaaatggccttacacctcccatggttccaccccagaaatgtctccggcttcagcattgcaaaccgctcatctataaaacgtctgtgcatcatcgagtctgtgtttgagggtgaaggctcagcaaccctgatgtctgccaactacccagaaggcttccctgaggatgagctcatgacgtggcagtttgtcgttcctgcacacctgcgggccagcgtctccttcctcaacttcaacctctccaactgtgagaggaaggaggagcgggttgaatactacatcccgggctccaccaccaaccccgaggtgttcaagctggaggacaagcagcctgggaacatggcggggaacttcaacctctctctgcaaggctgtgaccaagatgcccaaagtccagggatcctccggctgcagttccaagttttggtccaacatccacaaaatgaaagcagtgagtgagccccactttcctttttcttcctcctccagcaccttcgttgtttcctgggtagtctgcctgggtgaggctcccttcctgtttctcatctgtggcttctgaaacacttagactctggacccagcaagagtttcaggaagtgggttgctaggcagttagacaggcttgttggtgaacacccggtatgtagttccatttcagcacaataaaaagaaatcttgcattcaaaaaaaaaaaaaaaaaaa

SEQ ID NO: 120 - DNA, 1098 bp, Homo sapiens
ggctggcggccggcgggagaggcggccggcctggactggcccgagagggatcccggttcccagaacagacctaggaggcggcctcgagggcggacggcagggagggccagcatgccccgactgctgcaccccgccctgccgctgctcctgggcgccacgctgaccttccgggcgctccggcgcgcgctctgtcgcctgcccctacccgtgcacgtgcgcgccgaccccctgcgcacctggcgctggcacaacctgctcgtctccttcgctcactccattgtgtcggggatctgggcactgctgtgtgtatggcagactcctgacatgttagtggagattgagacggcgtggtcactttctggctatttgctcgtttgcttctctgcggggtatttcatccacgatacggtggacatcgtggctagcggacagacgcgagcctcttgggaataccttgtccatcacgtcatggccatgggtgccttcttctccggcatcttttggagcagctttgtcggtgggggtgtcttaacactactggtggaagtcagcaacatcttcctcaccattcgcatgatgatgaaaatcagtaatgcccaggatcatctcctctaccgggttaacaagtatgtgaacctggtcatgtactttctcttccgcctggcccctcaggcctacctcacccatttcttcttgcgttatgtgaaccagaggaccctgggcaccttcctgctgggtatcctgctcatgctggacgtgatgatcataatctacttttcccgcctcctccgctctgacttctgccctgagcatgtccccaagaagcaacacaaagacaagttcttgactgagtgaggggcacagagcctgggacaacaaaaacggacaaggccagaaacagcttcatatggacactgggacttagccccaagcctgggtgtcctctgaggccagcctctccaccttctgagcctgcgcccacactattgaaaacactaatgaaagtaaaaaaaaaaaaaaaaaaaaaaaaaaaaaaaaaaaaaaaaaaaaaaaaaaaaaaaaaaaaaaaaaaaaaaaaaaaaaaaaaaaaaaaaaaaa

SEQ ID NO: 121 - DNA, 566 bp, Homo sapiens
caccatgcctgcttgtcgcctaggcccgctagccgccgccctcctcctcagcctgctgctgttcggcttcaccctagtctcaggcacaggagcagagaagactggcgtgtgccccgagctccaggctgaccagaactgcacgcaagagtgcgtctcggacagcgaatgcgccgacaacctcaagtgctgcagcgcgggctgtgccaccttctgctctctgcccaatgataaggagggttcctgcccccaggtgaacattaactttccccagctcggcctctgtcgggaccagtgccaggtggacagccagtgtcctggccagatgaaatgctgccgcaatggctgtgggaaggtgtcctgtgtcactcccaatttctgagctccagccaccaccaggctgagcagtgaggagagaaagtttctgcctggccctgcatctggttccagcccacctgccctcccctttttcgggactctgtattccctcttgggctgaccacagcttctccctttcccaaccaataaagtaaccactttcagcaaaaaaaaaaaaaaaaaaaaaaaaa

SEQ ID NO: 122 - DNA, 6695 bp, Homo sapiens
cagggatccttccatgaagactgaggcaggcggagctgctaagagcctgctgacatgacatcggccacagagtttgaaaatgtgggcaaccagccaccttacagcaggatcaatgcccgctgggacgccccagacgacgagctggataatgacaacagctcagccaggctctttgagaggtcccggataaaggccttggcagatgagcgggaagttgttcagaaaaagaccttcacgaaatgggtgaactcgcacctggctcgagtgtcctgccgcatcaccgatctctacaaggacctgcgggatgggcgcatgctcatcaagctgctggaggtgctctctggagagatgctgccaaagcccaccaaggggaagatgcgcatccactgcctggagaatgtggacaaggctctccagttcctcaaggagcagcgtgtacacctggagaacatgggctcccacgacattgtagatggcaaccaccgcctggtcctgggcctcatctggaccatcatcctccgcttccagattcaggacattgtggtccaaactcaggaaggtcgtgaaacacgctcagccaaggatgcgttgctgttgtggtgtcagatgaagacggcaggctaccctcatgttaatgtcaccaactttacctccagctggaaggatggcttggcctttaatgccctgatacacaagcaccggcccgacctgatcgactttgataagctgaaggactccaatgcccggcacaacctggagcacgcattcaatgtggctgagcgccagctgggcatcatcccgctcctcgaccccgaagatgtctttacggaaaaccctgatgagaaatccatcatcacctatgtggtggccttttaccactacttctccaagatgaaggtgctggcagtggagggcaagcgtgtcggcaaggttattgaccatgccattgagactgagaagatgattgaaaagtacagcgggctagcctcggacctgctcacctggatcgagcagaccatcactgtcctgaacagccgcaagtttgccaactcgctgacgggcgtccagcagcagctgcaggccttcagcacctaccgcaccgtggagaagccgcccaagtttcaagagaaggggaatctggaagttctactttttaccatccagtcccggatgagagccaacaatcagaaagtgtacacaccccacgatgggaaactagtgtctgacatcaacagggcctgggaaagcctggaggaagctgagtatcggcgggagctggccctgagaaatgagctcattcggcaggagaagctagagcaactggcccggcgctttgaccggaaggccgcaatgagagagacctggctcagtgaaaaccagcgcctcgtggcccaggataactttgggtatgacctggcagctgtggaggccgccaagaagaagcatgaggccatcgagaccgacacggctgcctacgaggagcgggtgagagccctggaggacctggctcaggagctggagaaagagaactaccatgaccagaagcgcatcacggcccgcaaggacaatatactgcgcctatggagctacctgcaggagctgctgcagtcccggcgccagaggctcgagaccaccctggcactgcagaagctcttccaggacatgctgcacagcatcgactggatggatgagatcaaggctcacctcttgtctgccgagtttgggaagcacttgttggaggttgaagacctgctacagaagcacaagttgatggaagctgacatcgccatccaaggggacaaagtgaaggccatcaccgcagccaccctgaagttcaccgaggggaaagggtaccagccttgtgacccccaggtcatccaggaccgcatcagccacttggagcagtgctttgaggagctgagcaacatggcagctgggcggaaggcccaactggagcagtccaaacgactctggaagttcttctgggagatggatgaggctgagagctggatcaaggagaaggagcagatctattcttccctggactatggcaaagacctgaccagtgtgctcatcttacagcgcaagcacaaggcctttgaggatgagctccgtgggctggatgctcacctggagcagatcttccaggaggctcatggcatggttgcgcgcaagcagtttgggcacccgcagatcgaggcccgcataaaggaggtgtcggcacagtgggaccagctgaaggacctggctgccttctgcaagaagaacctccaggatgctgagaactttttccagttccagggcgatgcggatgacctgaaggcttggctgcaagacgcccaccggctgctctctggtgaagatgtggggcaggacgaaggggccacgcgggccctggggaaaaagcacaaggacttcctggaggagctggaggagagccgtggggtgatggagcacctggagcagcaggcccagggattccccgaagagtttcgggattccccagatgtgacccatcggctgcaggccctgcgggagctctaccaacaggtggtggcccaggcggacctgcgtcagcagaggctgcaggaagccctggacctgtacacggtgttcggggagacagacgcctgtgagctgtggatgggagagaaggagaagtggctggccgagatggaaatgccagacaccctggaggacctggaggtcgtgcagcacaggttcgacatcctggaccaggagatgaagaccttgatgactcagattgatggtgtgaacctcgctgccaacagcttggtagagagtggccacccacgcagcagggaggtgaagcagtaccaggaccatctgaacaccaggtggcaggcatttcagaccctggtgtcggagcggcgggaggctgtggactcagccctccgagtgcacaactactgcgtagattgcgaggagaccagcaagtggatcacggacaagacaaaggtagtggagtccacaaaagacctggggcgggacctggcaggtatcatcgccatccagaggaagttgtcagggctggagcgtgacgtggccgccatccaggcccgtgtggatgccctggagcgtgagtcccagcagctgatggactcgcaccctgagcagaaggaggatattggtcagcggcaaaaacacttggaggagctgtggcagggcctgcagcaatccctgcagggccaggaggacttgctgggggaagtcagccagctgcaggccttcctgcaggatctggatgacttccaggcctggctctccatcacccagaaggctgtggcctctgaggacatgcccgaatccctcccagaggctgagcagctcctgcagcagcatgcaggtatcaaggatgagattgacgggcaccaagacagctaccagcgtgttaaggagtctggggagaaagtgatccaaggccagacggacccagagtatctgcttctgggccagcggctggagggcctggatactggctggaatgccctgggcaggatgtgggagagccgcagccacaccctcgctcagtgccttggcttccaggagttccagaaagatgccaagcaggctgaagccatcctcagcaaccaggaatacactctggctcacttggagcccccagactccctggaagctgcagaggctgggatccggaagtttgaggatttcttggggtctatggagaacaaccgggataaggtcttgagtcctgtggactctggaaacaagctggtagctgagggaaacctatactcagacaagatcaaggagaaggtgcagctgattgaggacaggcacaggaagaacaacgagaaggcccaggaggcctctgtcctactgagagacaacctggagctacagaacttcctccagaactgccaggagctcactctctggatcaacgacaagctgctgacatctcaggatgtctcctatgatgaagcacgaaaccttcacaataaatggctaaagcaccaggcgtttgtggcagagctggcttcccatgaagggtggctagagaacatcgatgcggaaggaaagcagctgatggatgagaagccccagtttacagccctggtgtcccaaaagctggaagccctgcaccggctctgggacgagctgcaggccaccacaaaggagaagacccagcacctctcggctgccaggagctccgacctgcgcttgcagacccatgctgacctcaacaagtggatcagcgccatggaggaccagctgcggtcagacgacccgggcaaggacctgaccagtgtcaatcggatgttggctaagctgaagcgagtggaggaccaagtgaatgtgcgaaaagaggagctgggggagctgtttgcccaggtgccttcaatgggagaggagggaggagatgcagacttgagcatcgagaagcggttcctggacctcctggaacccctaggaaggaggaagaagcagctggaatcatccagagccaagctgcagatcagccgggacttagaggatgagacgctttgggtggaggagaggctgcctctggcccagtcagccgactatggcactaatctgcaaactgtgcaactgttcatgaagaagaaccagacactgcagaatgagattctgggccatacgccgcgggttgaggatgtgctgcagagagggcagcagctggtggaggcggcggagatcgactgccaggaccttgaggagcgcctggggcacctgcagagctcctgggacaggctgcgggaggcagcggccgggaggctgcagcgactgagggacgccaacgaggcacagcagtactacctggatgcagacgaggctgaggcctggattggcgagcaggagctctacgtcatctccgatgagatccccaaggatgaagagggcgccattgtgatgctgaagcgacatttgcggcagcagcgtgcggtggaggactacggccggaacatcaagcagctggccagccgggcccagggcctgctgtctgcaggccaccctgagggggaacagatcatcagacttcaggggcaagtggacaagcactacgcagggctgaaggacgtggcggaagagcgcaagcgcaagctggagaacatgtaccacctgttccagctcaagcgggagaccgacgacctggagcagtggatttcagaaaaggagctagtggcctcttccccggaaatggggcaagactttgaccacgtgactcttctgcgggacaagttccgggactttgcccgggagaccggggcgattgggcaggagcgggtggacaatgtgaatgccttcatcgagcgactcatcgacgcgggccacagcgaggcggccaccatcgccgagtggaaggacgggctgaacgagatgtgggcagacctcctggagctcattgacacgcgcatgcagctgctggccgcctcctatgacctgcaccgctacttctacacgggtgccgagatcctgggcctcatcgacgagaagcaccgcgagctgcccgaggacgtggggctggacgccagcacggccgagtccttccaccgggtgcacacagccttcgagcgggagctccacctgctgggtgtccaggtgcagcagttccaggacgtggccacccgtctgcagacagcatatgctggggagaaggcagaggccatccagaacaaggagcaggaggtgtctgccgcgtggcaggcgctgctcgatgcctgtgccgggcgccggacccagctagtggacacggcggataaattccgcttcttcagcatggcccgtgacctcctctcctggatggagagcatcatccggcagatcgagacccaggagaggcccagggatgtctcctctgtggaactgctcatgaagtatcaccagggcatcaatgcagagattgaaacccggagcaagaacttcagtgcctgcctggagcttggcgagtccctgctgcagcggcagcaccaggcctcagaggagatccgcgagaaactgcagcaggtgatgtccaggaggaaagagatgaatgagaagtgggaagcccgctgggagcggctccgcatgttgctggaggtgtgccagttctcgagggatgcctctgtggctgaggcgtggctgattgcccaggagccctacctggccagcggggactttggacacacagtggacagtgtggagaagctcatcaagaggcatgaggcttttgagaagtccacggccagctgggcagagcgctttgctgccctggagaagcccaccacgcttgagctgaaagaacgccagattgcagagagacccgcagaggagactgggcctcaagaggaggaaggcgagacagcaggggaggctccagtttcccaccatgcggccaccgagagaacgtccccggtcagtctctggtctcgtttgtctagttcctgggagtcactgcagccagagccctctcacccctactaggctcagcccaggtggaggcgagatgagctggcgcagccccgccctccatcctccccacatccctgcagccacctcccagcagagcaggctacgtcctcactgaggtgttcttcatgagagtactagcctcctccactcctccccacagcgcagaggaaacaggccagcccagtgacatgacgttattagttttgttttacctaatgtaataaattttattgtataaa

SEQ ID NO: 123 - DNA, 5917 bp, Homo sapiens
agccgttctccaattaaagctgttaacgtgtactacgctgtttccttgttggattttcttgttctctgctgctactgtaaaaacgaaatgagtggtcctgctcaggttccaatgatgtccccaaatggttctgtgcctcctatctatgtgcctcctggatatgccccacaggttattgaagacaatggtgttcgaagagttgtcgtggtccctcaggcaccagagtttcaccctggtagtcacacagttctccaccgttctccacatcctcctctacctggtttcattcctgtcccaactatgatgccgcctccaccacgtcatatgtactcacccgtgactggagctggagacatgacaacacagtatatgccacagtatcagtcttcacaagtctatggagatgtagatgctcactctacacatggaaggtccaactttagagatgaacgatctagtaaaacatatgaacgtttgcagaaaaaattgaaggatcgccaaggaacacagaaagataaaatgagcagtccaccatcatcaccccagaaatgcccttctcccattaatgaacataatggacttataaaaggacaaattgctggtggtataaacacaggatcagcaaaaatcaagtctgggaaggggaaaggtggtacacaagttgatacagaaattgaagaaaaagatgaagaaactaaagcatttgaagcacttctttccaacattgtcaaaccagtggcctccgacatccaggcaaggacagtagtacttacctggtcaccaccttccagcctcattaatggtgaaacagatgaaagtagtgtaccagagctctatggttatgaagttctgatctcaagtactggaaaagatgggaaatacaaaagtgtatatgtaggagaagaaacaaatatcactttaaatgatctcaagccagccatggattaccatgcaaaagtccaggcagaatataattctataaagggaactccttcagaggctgaaatctttaccaccttgagctgtgaacctgatatacctaatccaccaaggatagccaatcggaccaaaaattcactcactttgcaatggaaggcacctagtgacaatggttctaaaatccaaaactttgtattagaatgggatgaaggaaaaggaaatggagaattttgtcagtgttacatgggctcacagaaacaatttaaaattactaaactttcaccagcaatgggctgtaaattcagactatcggccagaaatgactatggtacaagtggttttagtgaagaagtcttatattacacctcaggctgtgctccttctatgccagcaagtcctgtattaaccaaggctggaattacttggttatccttacaatggagtaagccctcaggaacaccatcagatgaaggaatttcttacattttagagatggaggaagaaacttcaggatatggttttaagcctaaatatgatggagaagatcttgcttacacagtgaaaaatctcagacgtagtactaagtataaatttaaggttattgcttacaactcagaaggtaaaagtaatccaagtgaagtagtagaatttactacttgccctgataaaccaggcatacctgtaaagccttcagtgaaaggaaagatacattcacacagttttaaaataacctgggatccaccaaaagacaatggcggagcaaccatcaataaatatgtagtggagatggcagaaggttctaacggaaacaaatgggaaatgatatacagtggtgctaccagggaacatctttgtgatcgactgaatccaggctgtttctatcgtttacgagtttactgcatcagtgatggaggacagagtgcggtctctgaatctttacttgtgcagactccagctgtgcctcctggcccatgcctccctcccagattacagggtagacccaaagcaaaagaaatacagttacgatggggaccccctctggttgatggtggatcacccatttcctgttacagtgtggaaatgtctcctatagaaaaagatgaacctagagaagtttaccaaggttctgaagtagaatgtacagtgagcagccttcttcctggaaagacatacagcttcagactacgtgcagctaacaaaatggggtttggaccattttcagaaaaatgtgatattactacagcccctgggccaccagatcagtgcaagccccctcaagtgacatgtagatctgcaacttgtgcacaagtgaattgggaggttcctttgagtaatggaacagatgtcactgaatatcgactggagtggggaggagttgaaggaagtatgcagatatgttactgtgggcctggtctcagttatgaaataaaaggactttcaccagcaactacctattattgcagggtccaggctctgagtgttgtgggtgcaggccctttcagtgaagtagtagcctgtgtgactccaccatcagttcctggcattgtgacctgtcttcaagaaataagcgatgatgagatagaaaatccccattattcaccttctacatgccttgcaataagctgggaaaagccttgtgatcatggttcggaaatccttgcctacagcatagactttggagataaacaatccctaacagtgggaaaggttacaagctatattatcaacaatttgcaaccagatacaacatacagaatacgaattcaagccttgaatagccttggagctggtcctttcagccatatgataaaattaaaaactaagcctctccctcctgatccacctcgtctggaatgtgttgcctttagccaccagaaccttaagctgaaatggggagaaggaactccaaagacattgtcaaccgattctattcagtaccaccttcagatggaggataagaatggacggtttgtatccctatacagaggaccatgtcatacatacaaagtacaaagacttaatgagtcaacatcctataaattctgtattcaagcttgtaatgaagctggggaaggtcccctctcccaagaatatattttcactactccaaaatctgtcccagctgccttgaaagcccccaaaatagagaaagtaaatgatcacatttgtgaaattacatgggagtgtttacagccaatgaaaggtgatccagttatttacagtcttcaagttatgttgggaaaagattcagaattcaaacagatttacaagggtcccgactcttccttccggtattccagccttcagctgaactgtgaatatcgcttccgtgtatgtgccattcgccagtgccaagactctctgggacaccaggacctcgtaggtccctacagcaccacagtgctcttcatctctcagaggactgaaccaccagccagcaccaacagagacactgtggaaagcacaaggacccgacgggcactgagtgacgagcagtgtgctgccgtcatccttgtgctgtttgctttcttttccattttgattgcctttatcattcagtactttgtaatcaagtgaaaatataactttattttttaactctattacattttattttgtcatgtactaaaattatttctgtattgcttttataaaaaacagtggcatttagcactggcattgagactatagcacatcatttttgccattttcagtgcttatattgttaggtagaggctggcactttattagaatgcaagccacaaaaatatcaattttgttttttttgttagggtgggtcttctttttttctttccctctctctttttttaacaaatgccttcttatagaaaaactttctaagaggcaacaatttagaatggatattttgacgaatcggcatgagtgtaacagtgataacctgatctgtttgttttaaagattattaccaagtgaaaaattcagaatgaatagaatttacactaacatgctatataaaatgttaaagtctgatgctgtgaaagcaatctagtgctatatttctacctcctcatttgtcttaattatttggtaagtgggattatgatgagtaactggaggggcttagaaacaaaaactggatgaaagagtatgcatgaagaaaagcttctttgataaatgtggagttcttcattataaatatatattcatgaattcacagataagtacttaaagaacagacagtttacttggcctaaaaatattttgatgtttactcaaaaagtacctcttcaggtcttgagaacatggaaaagaattgagtgcttttaaatactttttagaaagtaatcataaaagtaaattgaatttcaaacctatttggcttctgttttgtgaacctttgaactatatgtatgtgtataagggtatacacatacatatatggcatataacaagtgtacacatatacacataacaagtgtagaagtatatattacatacatacactcactctgtctggtataggctaattttgaagaactcccataagtttctgctgcttctcccataactgctgccaccaccatcagaattcataatcaaacctaacctttttgtttggggcaccaaatctgaagacaaaattaatttgcaccagtaaacttcaagctgctttctttcttgaaaactaaacgtttaacgtataatgtctgtttggatactgttccaaattgttgattgcatgtggttaatgttgcattagagcactttgcaattgcataattcattaatgttttgtgagcttgcatttgtgagttattggatgatcagactgaattttgtcaagtatcacattgtacatcttgcctagatgtcgatgactgcaagtaataatacagtttataatgaaactatctacaattcttgttttagcacatctgttatccgtaaaacacctgtaactagcttttttaatttattatttgaattttaggatagcgaatcactaatttttagttgctgaggttggcattttagtgattattaagcacttctgtcagtctttgaaaaaagaacgtattttttgtgctttgaagatctctgaagaatttcttttataatagaatgggcatgtattgtaacagttttatgtcaaatgatctgtgctgtagaaaaacattaacccttgttcaaaaaagaaatggataaacttggcctttctaagtggtaagaatgacctgtcactataatatactgtatgtttacattttatttaaatttaatctcttatgtatagggtgataaccttccccagaaacaacagtgattgcgattgttttctagaaacttctttaaagtgccacatttggcagtacaaatgagtctgagtgtaatagcccagagatttatatatagttgaatgtctaaaatggtaaaatgtgccactgtgtcaagttacagtggcttatgtttttcatagtaattcaaatgaacttcctatttttgatagtaaatgtcatttaatagtatacttgccatttgagcctcactgcaaaattagtgcagaggagaaaacaatttttaatgtaatcttgattttacctcatatactgtacattccaaaaactctaaactttttaaagattatagatacactaccaaacatatcaccttaaaattgtataaggctgaatgaacttcatacaaatgaaaaaaatctcataaaaatacataaactatgtagcaaaagtatctgtaaaatccatggaaaataaaagttgtatcattctttttgagatacgtttattgtattcatatatattcattatttgctacctgtttaagaaagtgaaatgttatggtctcccctcttccaatgagcttaaaacatttttcccaacagtatataaatcttcaacatgagaggatgtatatttattatataaagcccagtaaagaataaaattagaagttttatcctaaaaaaaaaaaaaaaaaa

SEQ ID NO: 124 - DNA, 2612 bp, Homo sapiens
tgcagagggcgcagctccaccgtggtaacttgcaatgtggccgcccctgcgctggcttctttctcctcggccctcggtgaacccagcttttcctttaaagcatagacaaatccttgcttagggtcagccagaccgtgggcttgctttgggctcccgcgtggacgctgaaggctcttcatgatttctcagaaaccttggtgggccacccaaaaagtgtgttggaaatccacggtgatccttaatatggtgatgggattgtccgaaaaggatttcagatgcatgccaggtttccactgattgccagaactcgagatcactacacatggatccccaaaatcaacatggcagtggcagttcgttagttgtgatccagcagccttctttggatagccgtcagagattagactatgagagagagattcagcctactgctattttgtccttagaccagatcaaggccataagaggcagcaatgaatacacagaagggccttcggtggtgaaaagacctgctcctcggacagcaccaagacaagaaaagcatgaaaggactcatgaaatcataccaattaatgtgaataataactacgagcacagacacacaagccacctgggacatgcagtactcccaagtaatgccaggggccccattttgagcagatcaaccagcactggaagtgcagccagctctgggagcaacagcagtgcctcttctgaacagggactgttaggaaggtcaccaccaaccagaccagtccctggtcataggtctgaaagggcaatccggacccagcccaagcaactgattgtggatgacttgaagggttccttgaaagaggacctgacacagcacaagttcatttgtgaacagtgtgggaagtgcaagtgtggagaatgcactgctcccaggaccctaccatcctgtttggcctgtaaccggcagtgcctttgctctgctgagagcatggtggaatatggaacctgcatgtgcttagtcaagggcatcttctaccactgctccaatgacgacgaaggggattcctattcagataatccttgctcctgttcacaatcacactgctgctctagatacctgtgtatgggagccatgtctttatttttaccttgcttactctgttatcctcctgctaaaggatgcctgaagctgtgcaggaggtgttatgactggatccatcgcccagggtgcagatgtaagaactccaacactgtctattgtaagctggagagctgcccctcccggggtcagggtaaaccatcatgatttttggaggtgggttgtacctcctgaacttttagctttcaagttgtggctgttttttgtttttgtttttgtttttgttttctttagaatttttccctgtttcccaccttctcttcccctgttgccaaggtctaactcatggatttttctctttcctcatggatgatcttcagcaagagtggactgggaagctgcacctggctcccactttcaacaagagcctctgccatccacttgagggtattgagagccagtgggcttttgtgtagcctttttgttctgcaagcaactttctaaagttgtgtacatgaacatacacccacatccagactacagtgatttagagttgttttgattgggtaccgtgggagcagggaaattggttttttaaaaagcaactgtttaattgcttaaataagctatgtattaaatctgtctccagttagggctatcttcctagcataggccccttaagtagcatgggggatatattttttgctataacgtaaaaattttcctttaaccactgccctctccttctttctccttcaaggttctttccccctcagttttgttgttgtcttactctggagatgccaagtgtattttttctttctatgtaattttagattcgccttacaatgtaaatcttcacattggagataatattggttggaccttgcccatcttcactctagccttcgtatttgtgaaggactcagccaccttccttcttcaccccatgcttctcaccaaatttttgttgtcattgagggcacttggataactcaagttgatatttatagctgatcaatctatatgtgtcacagaactatgctgcctaaagtgatcttggctccttaatggtccttttggccccttggatagttaacagctgagtaattctaatctcttctgtgttttccttgccttaaccacaaattgtggtgctttttgtatattttatgtataaatcacaaagttgaattctgactatttttaagacaaaagtctgttaaacttttttattgtaaagaatatttattatgcgaatctctattattttatggtatttattgcaaaagactgttgaaatgtactcatgtttgaatataacaaaatatcaatacttaacggaaaataaggtgacacgaagaaagtacatatgttaactataatgcagaaaatatattaattaatgaaaaaaaaaaaaaaaaaaaaaaaaaaaaaaaaaaaaaaaaaaaaaaaaaaaaaaaaaaaaaaaaaaaaaaaaaaaaaaaaaaaaaaaaaaaaaaaaaaaaaaaaaaaaaaaaaaaaaaaaaaaaaaaaa

SEQ ID NO: 125 - DNA, 5619 bp, Homo sapiens
cagcccgccactgccacccggccccgtgcgctcattggtcgggatgtgtcggctcagcagcctccaacttctcccgaatcccactgattttaggtgatgggcaagtcagaaagtcagatggatataactgatatcaacactccaaagccaaagaagaaacagcgatggactccactggagatcagcctctcggtccttgtcctgctcctcaccatcatagctgtgacaatgatcgcactctatgcaacctacgatgatggtatttgcaagtcatcagactgcataaaatcagctgctcgactgatccaaaacatggatgccaccactgagccttgtacagactttttcaaatatgcttgcggaggctggttgaaacgtaatgtcattcccgagaccagctcccgttacggcaactttgacattttaagagatgaactagaagtcgttttgaaagatgtccttcaagaacccaaaactgaagatatagtagcagtgcagaaagcaaaagcattgtacaggtcttgtataaatgaatctgctattgatagcagaggtggagaacctctactcaaactgttaccagacatatatgggtggccagtagcaacagaaaactgggagcaaaaatatggtgcttcttggacagctgaaaaagctattgcacaactgaattctaaatatgggaaaaaagtccttattaatttgtttgttggcactgatgataagaattctgtgaatcatgtaattcatattgaccaacctcgacttggcctcccttctagagattactatgaatgcactggaatctataaagaggcttgtacagcatatgtggattttatgatttctgtggccagattgattcgtcaggaagaaagattgcccatcgatgaaaaccagcttgctttggaaatgaataaagttatggaattggaaaaagaaattgccaatgctacggctaaacctgaagatcgaaatgatccaatgcttctgtataacaagatgacattggcccagatccaaaataacttttcactagagatcaatgggaagccattcagctggttgaatttcacaaatgaaatcatgtcaactgtgaatattagtattacaaatgaggaagatgtggttgtttatgctccagaatatttaaccaaacttaagcccattcttaccaaatattctgccagagatcttcaaaatttaatgtcctggagattcataatggatcttgtaagcagcctcagccgaacctacaaggagtccagaaatgctttccgcaaggccctttatggtacaacctcagaaacagcaacttggagacgttgtgcaaactatgtcaatgggaatatggaaaatgctgtggggaggctttatgtggaagcagcatttgctggagagagtaaacatgtggtcgaggatttgattgcacagatccgagaagtttttattcagactttagatgacctcacttggatggatgccgagacaaaaaagagagctgaagaaaaggccttagcaattaaagaaaggatcggctatcctgatgacattgtttcaaatgataacaaactgaataatgagtacctcgagttgaactacaaagaagatgaatacttcgagaacataattcaaaatttgaaattcagccaaagtaaacaactgaagaagctccgagaaaaggtggacaaagatgagtggataagtggagcagctgtagtcaatgcattttactcttcaggaagaaatcagatagtcttcccagccggcattctgcagccccccttctttagtgcccagcagtccaactcattgaactatgggggcatcggcatggtcataggacacgaaatcacccatggcttcgatgacaatggcagaaactttaacaaagatggagacctcgttgactggtggactcaacagtctgcaagtaactttaaggagcaatcccagtgcatggtgtatcagtatggaaacttttcctgggacctggcaggtggacagcaccttaatggaattaatacactgggagaaaacattgctgataatggaggtcttggtcaagcatacagagcctatcagaattatattaaaaagaatggcgaagaaaaattacttcctggacttgacctaaatcacaaacaactatttttcttgaactttgcacaggtgtggtgtggaacctataggccagagtatgcggttaactccattaaaacagatgtgcacagtccaggcaatttcaggattattgggactttgcagaactctgcagagttttcagaagcctttcactgccgcaagaattcatacatgaatccagaaaagaagtgccgggtttggtgatcttcaaaagaagcattgcagcccttggctagacttgccaacaccacagaaatggggaattctctaatcgaaagaaaatgggccctaggggtcactgtactgacttgagggtgattaacagagagggcaccatcacaatacagataacattaggttgtcctagaaagggtgtggagggaggaagggggtctaaggtctatcaagtcaatcatttctcactgtgtacataatgcttaatttctaaagataatattactgtttatttctgtttctcatatggtctaccagtttgctgatgtccctagaaaacaatgcaaaacctttgaggtagaccaggatttctaatcaaaagggaaaagaagatgttgaagaatacagttaggcaccagaagaacagtaggtgacactatagtttaaaacacattgcctaactactagtttttacttttatttgcaacatttacagtccttcaaaatccttccaaagaattcttatacacattggggccttggagcttacatagttttaaactcatttttgccatacatcagttattcattctgtgatcatttattttaagcactcttaaagcaaaaaatgaatgtctaaaattgttttttgttgtacctgctttgactgatgctgagattcttcaggcttcctgcaattttctaagcaatttcttgctctatctctcaaaacttggtatttttcagagatttatataaatgtaaaaataataatttttatatttaattattaactacatttatgagtaactattattataggtaatcaatgaatattgaagtttcagcttaaaataaacagttgtgaaccaagatctataaagcgatatacagatgaaaatttgagactatttaaacttataaatcatattgatgaaaagatttaagcacaaactttagggtaaaaattgccattggacagttgtctagagatatatatacttgtggttttcaaattggactttcaaaattaaatctgtccctgagagtgtctctgataaaagggcaaatctgcacctatgtagctctgcatctcctgtcttttcaggtttgtcatcagatggaaatattttgataataaattgaaattgtgaactcattgctccctaagactgtgacaactgtctaactttagaagtgcatttctgaatagaaatgggaggcctctgatggaccttctagaattataagtcacaaagagttctggaaaagaactgtttactgcttgataggaattcatcttttgaggcttctgttcctctcttttcctgttgtattgactattttcgttcattacttgattaagattttacaaaagaggagcacttccaaaattcttatttttcctaacaaaagatgaaagcagggaatttctatctaaatgatgagtattagttccctgtctcttgaaaaatgcccatttgcctttaaaaaaaaaagttacagaaatactataacatatgtacataaattgcataaagcataagtatacagttcaataaacttaactttaactgaacaatggccctgtagccagcacctgtaagaaacagagcagtaccagcgctctaaaagcacctccttgtcactttattactcccagaacaacaactatcctgacttctaatatcattcactagctttgcctggttttgtcttttatgcagatagaatcaatcagtatgtattcttttgtgcctggcttctttctctcagccttacatttgtgagattcctctgtattgtgctgattgtggatcttttcattctcattgcagaataatgttctattgtgggacttattacaatttgttcatcctattgttgatgggcacttgagaactttccattttggcgctattacaaatagtgcaactatgaatgtactgcatgttaccatcttacttgagcctttaatggacttatttcttcaaatccttccaaaaattattataagcattgaaattatagtttcaagccaactgtggatacccttaccctttcctcctttatcacaaccaccgttacaagtatacttatatttccctaaaatacatttaaaacttacctaagtgacatttgtagttggagtaataggagcttccagctctaataaaacagctgtctctaacttattttatttccatcatgtcagagcaggtgaagagccagaagtgaagagtgactagtacaaattataaaaagccactagactcttcactgttagctttttaaaacattaggctcccatccctatggaggaacaactctccagtgcctggatcccctctgtctacaaatataagattttctgggcctaaaggatagatcaaagtcaaaaatagcaatgcctccctatccctcacacatccagacatcatgaattttacatggtactcttgttgagttctgtagagccttctgatgtctctaaagcactaccgattctttggagttgtcacatcagataagacatatctctaattccatccataaatccagttctactatggctgagttctggtcaaagaaagaaagtttagaagctgagacacaaagggttgggagctgatgaaactcacaaatgatggtaggaagaagctctcgacaatacccgttggcaaggagtctgcctccatgctgcagtgttcgagtggattgtaggtgcaagatggaaaggattgtaggtgcaagctgtccagagaaaagagtccttgttccagccctattctgccactcctgacagggtgaccttgggtatttgcaatattcctttgggcctctgcttctctcacctaaaaaaagagaattagattatattggtggttctcagcaagagaaggagtatgtgtccaatgctgccttcccatgaatctgtctcccagttatgaatcagtgggcaggataaactgaaaactcccatttacgtgtctgaatcgagtgagacaaaattttagtccaaataacaagtaccaaagttttatcaagtttgggtctgtgctgctgttactgttaaccatttaagtggggcaaaaccttgctaattttctcaaaagcatttatcattcttgttgccacagctggagctctcaaactaaaagacatttgttattttggaaagaagaaagactctattctcaaagtttcctaatcagaaatttttatcagtttccagtctcaaaaatacaaaataaaaacaaacgtttttaatactattgcttttatgcctagtcaactctg

SEQ ID NO: 126 - DNA, 1092 bp, Homo sapiens
cagtcatggctgccgccgtcgctgctgccggtgcaggggaaccccagtccccggacgaattgctcccgaaaggcgacgcggagaagcctgaggaggagctggaggaggacgacgatgaggagctagatgagaccctgtcggagagactatggggcctgacggagatgtttccggagagggtccggtccgcggccggagccacttttgatctttccctctttgtggctcagaaaatgtacaggttttccagggcagccttgtggattgggaccacttcctttatgatcctggttcttcccgttgtctttgagacggagaagttgcaaatggagcaacagcagcaactgcagcagcggcagatacttctaggacctaacacagggctctcaggaggaatgccaggggctctaccctcacttcctggaaagatctagattgttattgctgtttgagctgtctcagtgggataagtttgaaattcaagtgtttgaactgctgataatttggatttttttttttttaactttggcacattgatctatctaaacccggtggggagaattatccccacattgtctcatggaaagactcaacttgcaactgtgccctccacactatccttacttctgtctccactctgataccagagtgcagccatgcagacggttattccagctctggtcacccgactcctttcaccaaattgctcctaactggaagatctcactttccccttgtggggtaggaaccgatgccagtgggagggatgtgcccctgaccattaacgactgtttttttttttttttttaaagaatggagttgttggggcgggacatgcacacaatgtgaaacagacaaaatgcattacacctgtagtgtaaagtggccactatgaatccctatgtatgagaggagggaggcaggctgcagcttcagccacagaatggggactatggaagacagcaggagctcatttcctctgcacattttggctgttagacctgtgtgtgtgtttaaaaaaagagaagtcagtgctcactttttgtatttaaatattaaaaatgattccaactgaaaaaaaaaaaaaaaaaa

SEQ ID NO: 127 - DNA, 1486 bp, Homo sapiens
agcagcaggaggaggcagagcacagcatcgtcgggaccagactcgtctcaggccagttgcagccttctcagccaaacgccgaccaaggaaaactcactaccatgagaattgcagtgatttgcttttgcctcctaggcatcacctgtgccataccagttaaacaggctgattctggaagttctgaggaaaagcagctttacaacaaatacccagatgctgtggccacatggctaaaccctgacccatctcagaagcagaatctcctagccccacagacccttccaagtaagtccaacgaaagccatgaccacatggatgatatggatgatgaagatgatgatgaccatgtggacagccaggactccattgactcgaacgactctgatgatgtagatgacactgatgattctcaccagtctgatgagtctcaccattctgatgaatctgatgaactggtcactgattttcccacggacctgccagcaaccgaagttttcactccagttgtccccacagtagacacatatgatggccgaggtgatagtgtggtttatggactgaggtcaaaatctaagaagtttcgcagacctgacatccagtaccctgatgctacagacgaggacatcacctcacacatggaaagcgaggagttgaatggtgcatacaaggccatccccgttgcccaggacctgaacgcgccttctgattgggacagccgtgggaaggacagttatgaaacgagtcagctggatgaccagagtgctgaaacccacagccacaagcagtccagattatataagcggaaagccaatgatgagagcaatgagcattccgatgtgattgatagtcaggaactttccaaagtcagccgtgaattccacagccatgaatttcacagccatgaagatatgctggttgtagaccccaaaagtaaggaagaagataaacacctgaaatttcgtatttctcatgaattagatagtgcatcttctgaggtcaattaaaaggagaaaaaatacaatttctcactttgcatttagtcaaaagaaaaaatgctttatagcaaaatgaaagagaacatgaaatgcttctttctcagtttattggttgaatgtgtatctatttgagtctggaaataactaatgtgtttgataattagtttagtttgtggcttcatggaaactccctgtaaactaaaagcttcagggttatgtctatgttcattctatagaagaaatgcaaactatcactgtattttaatatttgttattctctcatgaatagaaatttatgtagaagcaaacaaaatacttttacccacttaaaaagagaatataacattttatgtcactataatcttttgttttttaagttagtgtatattttgttgtgattatctttttgtggtgtgaataaatcttttatcttgaatgtaataagaaaaaaaaaaaaaaaataaaaaaaaaaaaaaaaaaaaaaaaaaaaa

SEQ ID NO: 128 - DNA, 4194 bp, Homo sapiens
cctgatccgaggagaccccgcgctcccgcagccatgggcaccgggggccggcggggggcggcggccgcgccgctgctggtggcggtggccgcgctgctactgggcgccgcgggccacctgtaccccggagaggtgtgtcccggcatggatatccggaacaacctcactaggttgcatgagctggagaattgctctgtcatcgaaggacacttgcagatactcttgatgttcaaaacgaggcccgaagatttccgagacctcagtttccccaaactcatcatgatcactgattacttgctgctcttccgggtctatgggctcgagagcctgaaggacctgttccccaacctcacggtcatccggggatcacgactgttctttaactacgcgctggtcatcttcgagatggttcacctcaaggaactcggcctctacaacctgatgaacatcacccggggttctgtccgcatcgagaagaacaatgagctctgttacttggccactatcgactggtcccgtatcctggattccgtggaggataattacatcgtgttgaacaaagatgacaacgaggagtgtggagacatctgtccgggtaccgcgaagggcaagaccaactgccccgccaccgtcatcaacgggcagtttgtcgaacgatgttggactcatagtcactgccagaaagtttgcccgaccatctgtaagtcacacggctgcaccgccgaaggcctctgttgccacagcgagtgcctgggcaactgttctcagcccgacgaccccaccaagtgcgtggcctgccgcaacttctacctggacggcaggtgtgtggagacctgcccgcccccgtactaccacttccaggactggcgctgtgtgaacttcagcttctgccaggacctgcaccacaaatgcaagaactcgcggaggcagggctgccaccagtacgtcattcacaacaacaagtgcatccctgagtgtccctccgggtacacgatgaattccagcaacttgctgtgcaccccatgcctgggtccctgtcccaaggtgtgccacctcctagaaggcgagaagaccatcgactcggtgacgtctgcccaggagctccgaggatgcaccgtcatcaacgggagtctgatcatcaacattcgaggaggcaacaatctggcagctgagctagaagccaacctcggcctcattgaagaaatttcagggtatctaaaaatccgccgatcctacgctctggtgtcactttccttcttccggaagttacgtctgattcgaggagagaccttggaaattgggaactactccttctatgccttggacaaccagaacctaaggcagctctgggactggagcaaacacaacctcaccatcactcaggggaaactcttcttccactataaccccaaactctgcttgtcagaaatccacaagatggaagaagtttcaggaaccaaggggcgccaggagagaaacgacattgccctgaagaccaatggggaccaggcatcctgtgaaaatgagttacttaaattttcttacattcggacatcttttgacaagatcttgctgagatgggagccgtactggccccccgacttccgagacctcttggggttcatgctgttctacaaagaggccccttatcagaatgtgacggagttcgacgggcaggatgcgtgtggttccaacagttggacggtggtagacattgacccacccctgaggtccaacgaccccaaatcacagaaccacccagggtggctgatgcggggtctcaagccctggacccagtatgccatctttgtgaagaccctggtcaccttttcggatgaacgccggacctatggggccaagagtgacatcatttatgtccagacagatgccaccaacccctctgtgcccctggatccaatctcagtgtctaactcatcatcccagattattctgaagtggaaaccaccctccgaccccaatggcaacatcacccactacctggttttctgggagaggcaggcggaagacagtgagctgttcgagctggattattgcctcaaagggctgaagctgccctcgaggacctggtctccaccattcgagtctgaagattctcagaagcacaaccagagtgagtatgaggattcggccggcgaatgctgctcctgtccaaagacagactctcagatcctgaaggagctggaggagtcctcgtttaggaagacgtttgaggattacctgcacaacgtggttttcgtccccaggccatctcggaaacgcaggtcccttggcgatgttgggaatgtgacggtggccgtgcccacggtggcagctttccccaacacttcctcgaccagcgtgcccacgagtccggaggagcacaggccttttgagaaggtggtgaacaaggagtcgctggtcatctccggcttgcgacacttcacgggctatcgcatcgagctgcaggcttgcaaccaggacacccctgaggaacggtgcagtgtggcagcctacgtcagtgcgaggaccatgcctgaagccaaggctgatgacattgttggccctgtgacgcatgaaatctttgagaacaacgtcgtccacttgatgtggcaggagccgaaggagcccaatggtctgatcgtgctgtatgaagtgagttatcggcgatatggtgatgaggagctgcatctctgcgtctcccgcaagcacttcgctctggaacggggctgcaggctgcgtgggctgtcaccggggaactacagcgtgcgaatccgggccacctcccttgcgggcaacggctcttggacggaacccacctatttctacgtgacagactatttagacgtcccgtcaaatattgcaaaaattatcatcggccccctcatctttgtctttctcttcagtgttgtgattggaagtatttatctattcctgagaaagaggcagccagatgggccgctgggaccgctttacgcttcttcaaaccctgagtatctcagtgccagtgatgtgtttccatgctctgtgtacgtgccggacgagtgggaggtgtctcgagagaagatcaccctccttcgagagctggggcagggctccttcggcatggtgtatgagggcaatgccagggacatcatcaagggtgaggcagagacccgcgtggcggtgaagacggtcaacgagtcagccagtctccgagagcggattgagttcctcaatgaggcctcggtcatgaagggcttcacctgccatcatgtggtgcgcctcctgggagtggtgtccaagggccagcccacgctggtggtgatggagctgatggctcacggagacctgaagagctacctccgttctctgcggccagaggctgagaataatcctggccgccctccccctacccttcaagagatgattcagatggcggcagagattgctgacgggatggcctacctgaacgccaagaagtttgtgcatcgggacctggcagcgagaaactgcatggtcgcccatgattttactgtcaaaattggagactttggaatgaccagagacatctatgaaacggattactaccggaaagggggcaagggtctgctccctgtacggtggatggcaccggagtccctgaaggatggggtcttcaccacttcttctgacatgtggtcctttggcgtggtcctttgggaaatcaccagcttggcagaacagccttaccaaggcctgtctaatgaacaggtgttgaaatttgtcatggatggagggtatctggatcaacccgacaactgtccagagagagtcactgacctcatgcgcatgtgctggcaattcaaccccaagatgaggccaaccttcctggagattgtcaacctgctcaaggacgacctgcaccccagctttccagaggtgtcgttcttccacagcgaggagaacaaggctcccgagagtgaggagctggagatggagtttgaggacatggagaatgtgcccctggaccgttcctcgcactgtcagagggaggaggcggggggccgggatggagggtcctcgctgggtttcaagcggagctacgaggaacacatcccttacacacacatgaacggaggcaagaaaaacgggcggattctgaccttgcctcggtccaatccttcctaacagtgcctaccgtggcgggggcgggcaggggttcccattttcgctttc

SEQ ID NO: 129 - DNA, 4988 bp, Homo sapiens
agaaaaacggggagcaggagccagactaggggaggaagaggactggcccgctcagggaatagctgggttgctgcaaaaaggggcggggagaaggcgggggcgctgcatgcagcgcgctggctccagcggtggccgcggggaatgtgacatcagcggcgccgggcgcttggggctggaggaggcagctcgcctcagctgcgctgtgcacacctcgcccgggggaggacgcagacccgggcaggcggcagggatgtcggcgaaggagaggccaaagggcaaagtgatcaaggacagcgtcaccctcctgccctgcttttatttcgtcgagttgcctatattggcatcatcggtggttagcctctatttcctcgaactcacagatgtcttcaaacctgtgcactctggatttagctgctatgaccggagtcttagcatgccgtacattgaaccaacccaggaggcaattccattcctcatgttgcttagcttggcttttgctggacctgcaattacgattatggtaggagaaggaattctctactgttgcctctccaaaagaagaaatggggtcggactagagcccaacattaatgctggaggctgcaacttcaattccttcctcagacgagctgtcagattcgttggtgttcatgtatttggattatgctctacagctctcattacagatatcatacagctgtccacaggatatcaagcaccttactttctgactgtgtgcaaaccaaactatacctctctgaatgtatcttgcaaagaaaattcctacattgtggaagatatttgctcaggatctgacctcacagttatcaacagtggcagaaagtccttcccttctcaacatgcaacccttgctgcctttgcagctgtgtatgtttcgatgtacttcaattccacattaacggattcctctaagcttctgaaacctctcttggtcttcacatttatcatctgtggaataatctgcgggctaacacggataactcagtataagaaccacccagttgatgtctattgtggctttttaataggaggaggaattgcactgtacttgggcttgtatgctgtggggaatttcctgcccagtgatgagagtatgtttcagcacagagacgccctcaggtctctgacagacctcaatcaagatcccaaccgacttttatctgctaaaaatggtagcagcagtgatggaattgctcatacagaaggcatcctcaaccgaaaccacagagatgctagctctctgacaaatctcaaaagagcaaatgctgatgtggaaatcattactccacggagccccatggggaaggagaacatggttaccttcagcaataccttgccgcgagccaataccccatctgtagaagaccctgtcagaagaaatgcgagcattcatgcctctatggattccgctcgatcaaagcagctcctcacccagtggaagaataagaatgaaagtcgaaagttgtccttgcaagttatagagcctgagcctgggcagtcaccacccagatccatagaaatgaggtcaagctcagagccatcgagggtaggggtgaatggagaccaccatggtcctggcaatcagtacctcaaaatccagcctggcgctgtccccggatgtaacaacagcatgcctggagggccaagagtgtccattcagtcccgtcctgggtcctcacagttggtgcacatccctgaggagactcaggaaaacataagcacctcccccaaaagcagctctgctcgggccaagtggttaaaagctgctgaaaagactgtggcctgtaacagaagcaacagccagccccgaatcatgcaagtcatagccatgtccaagcagcagggtgtcctccaaagcagccccaagaacactgaaggcagcacggtctcctgcactggctccatccgctataaaaccttgacagaccatgagcccagtgggatagtgagggttgaggctcacccagagaacaacaggcccatcatacagatcccgtccactgaaggtgaaggcagtggctcctggaagtggaaagcccctgaaaagggcagccttcgccaaacttacgagctcaacgatctcaacagggactcagaaagctgtgagtctctgaaagacagctttggttctggagatcgcaagagaagcaacattgatagcaatgagcatcaccaccacggaattaccaccatccgcgtcaccccagtagagggcagcgaaattggctcagagacgctgtccatttcttcttcccgcgactccaccctgcggagaaagggcaatatcattctaatccctgaaagaagcaacagccccgaaaacactagaaatatcttctacaaaggaacctcccccacacgggcttataaggattgagtgatgtccattccatcattagggctactcgcaaaagaccatatgttgattctacctgtgttctgttccagcgaattgggaagtctcaccaagctagattgtctaccatcagcccagaactctgtaacttttcagaactgctatactcaaacttgcagatctcacatcaaggagagggaaaagcacaatgcaagaacctaactaacgtgatgatatgaagagttttcttaagacctgtcgtcaaacttaaaaggttttgcagagggcagtatcaaaagaaagtggttttcttcaaatgtatactattttacttcctgaatgtgccaactttggggatttttctttatagtgagctgtgggaacccagaacacacacgttttccctacagcagaggccatgcagtattatatattcattttgcagaatctgcacctacagctcaatacgggtggtgctgattattatagtacatataccatgtaaactctcaaactctatttagctgtgaaatagtggtgtgcaattccttgttaaagaaatgctactttattaagaagatgctggctgctttgtgttagaataggacaccccgcagcttctctgtagtggctctgtcacagtcaaaaaatgaaaaggtttttgtgcgtttcttcaaaattctgctttcttcaacatcaaaaattgtgtagaaatattttcagtgaaagggaataactagtacttttctgcatagtttttcttctgcttactttttatttaagtataggtactgctaatgaatctgttttcttagtgagtaaatttgcataattttataaatattattttagagaatcttttgaaattgttgtgatcatattttgctttctatggcttctccttaacttattgattaattttttgaagttatagatatgttctcctattttaaaagcaaaaataacaattgacattccttgagcaaaatatactgctgtgaatttgcaaacaagaaatctgagccaaaacttgacattgtgggttacattgccagaaatgttggtcaagtttgcccttagatgtctacaactagctggcataggttgccatcttaacaagtaatctaaaagtcccattcggttctacattattaactttttttttctatatcctgatgaccagtaaattagagccacactggttaagtttgactcgtctctaaaacgtttttgttaattggacaccaagaggaagaatctgaaaaaaaaatgcatgttggtaagtaaaagtatctcacggtacaaattaagaatgactttcttcaaaatatctgaataggtgcagttttagtttaacatgcaaacaaccattgttgctacctatcctgaatcaagccttgagcctaaatcaaagcaaaccaataccattgataagaagaagataaaaacaaaatattttggagtgttttccaacttaaagtatgaagacatactcagttcttggaacttagtattaaaccttttttatgccatttcataagaattccgatatatacttgatgattgccaaggggatgaaaggaaacaacagagatggttgatctgatcttagctcactttccaataacagaaggagttgtttacagatgaatagtatcacatcattatcaatttccacatgaaaaaggtggagctttctagaaaaaccaacctctaaggcattaggaatttagctgaaaccagcagaattgaaaactctggcaataaaacatggactcaaccatatcccttctggcaatttccttctcagagaggggagtgggaataaaatgttgccttccccacttctcaccaccaccgccatcatgacgctcatactggcttttgcctgtttgtagaggaaaaggtgggctggttttagtactctgaaggacaaaaacaagcaaacaaaaacccctgctgcagcatttcaggtgcagtatgatatttcctaatctttcctatttcttaacaaaagattttaaagtacttctctagtcattgaagtttttttttctttacataaatattgatatattctttttctactcaaagtgccaaaggctacagtttttaatgacttaacaaattgtaccacattgttaaggacatataatgatagacactagaactcagacctctgcatgtatatttgataacatgtcttttgtaaaacaaaaattacaaaaaaatttgtttacattccactggtaccttaatttaaaataaatcagactaaaaggtggtatctcttcttagtgttctatttatcttatttgctaatgggagcacttcttcctttgttaggctgtgctttactgataaaaccaagtattgaataaagagagttaattatctttttaaagtaaataaaattatgaaaatatatatagtatatataaagtactgtgtttaaaaaaatgttatgcaatgttttccaaactgataaagtttgtaaagtgctataaatgtattttgttaagtacagataaaagctattgtgtgagtatattgtgctaaaatcatagaaataaagattagatttcttcatcaaaaaaaaaaaaaaaaaaaa

SEQ ID NO: 130 - DNA, 1652 bp, Homo sapiens
gtggcccggatgttcggtgcagctgccagatccgctgatctagtgcttctcgaaaaaaaccttcaggcggcccatggcatgccttggactttattgtgggaagaccctattatttaaaaatggctcaactgaaatatatggagaatgtggggtatgcccaagaggacagagaacgaatgcacagaaatattgtcagccttgcacagaatctcctgaactttatgattggctctatcttggatttatggcaatgcttcctctggttttacattggttcttcattgaatggtactcggggaaaaagagttccagcgcacttttccaacacatcactgcattatttgaatgcagcatggcagctattatcaccttacttgtgagtgatccagttggtgttctttatattcgttcatgtcgagtattgatgctttctgactggtacacgatgctttacaacccaagtccagattacgttaccacagtacactgtactcatgaagccgtctacccactatataccattgtatttatctattacgcattctgcttggtattaatgatgctgctccgacctcttctggtgaagaagattgcatgtgggttagggaaatctgatcgatttaaaagtatttatgctgcactttacttcttcccaattttaaccgtgcttcaggcagttggtggaggccttttatattacgccttcccatacattatattagtgttatctttggttactctggctgtgtacatgtctgcttctgaaatagagaactgctatgatcttctggtcagaaagaaaagacttattgttctcttcagccactggttacttcatgcctatggaataatctccatttccagagtggataaacttgagcaagatttgccccttttggctttggtacctacaccagcccttttttacttgttcactgcaaaatttaccgaaccttcaaggatactctcagaaggagccaatggacactgagtgtagacatgtgaaatgccaaaaacctgagaagtgctcctaataaaaaagtaaatcaatcttaacagtgtatgagaactattctatcatatatgggaacaagattgtcagtatatcttaatgtttgggtttgtctttgttttgtttatggttagacttacagacttggaaaatgcaaaactctgtaatactctgttacacagggtaatattatctgctacactggaaggccgctaggaagcccttgcttctctcaacagttcagctgttctttagggcaaaatcatgtttctgtgtacctagcaatgtgttcccattttattaagaaaagctttaacacgtgtaatctgcagtccttaacagtggcgtaattgtacgtacctgttgtgtttcagtttgtttttcacctataatgaattgtaaaaacaaacatacttgtggggtctgatagcaaacatagaaatgatgtatattgttttttgttatctatttattttcatcaatacagtattttgatgtattgcaaaaatagataataatttatataacaggttttctgtttatagattggttcaagatttgtttggattattgttcctgtaaagaaaacaataataaaaagcttacctacaaaaaaaaaaaaaaaaaaaaaaaaaaaaaa

SEQ ID NO: 131 - DNA, 3745 bp, Homo sapiens
ggcggcggcgacgcggggccggcggccgtgcggtgccgggagggcggctgggcaggcggcaggatgctgcgcgccgccctgtccctgctcgcgctgcccctggcgggggcggccgaagagcccacccagaagccagagtccccgggcgagcctcccccaggcttagagctcttccgctggcagtggcacgaggtggaggcgccctacctggtggccctgtggatcctggtggccagtctggccaaaatcgtgtttcacctgtctcggaaagtaacatctctggtccctgagagctgcctgctgattttgctgggcctggtgctagggggaattgttttggctgtggccaagaaagctgagtaccagctggagccaggcaccttcttcctcttcctgctgcctcctattgtgttggactcaggctatttcatgcctagcaggctgttctttgacaacttgggtgccatcctcacctatgccgtggtaggcacactctggaatgccttcacaacaggcgctgccctctggggcttgcagcaggctggacttgtagcccctagggtgcaggctggcttactggacttcctgctgtttgggagcctcatctcggcggtggaccccgtggccgtgctagctgtctttgaggaggtgcacgtcaatgagactctctttatcatcgtctttggcgagtccctgctcaacgatgctgtcaccgtggtgctgtacaaggtctgcaactcctttgtggagatgggctctgccaatgtgcaggccactgactacctgaagggagtcgcctccctgtttgtggtcagtctgggcggggcagccgtgggcttagtctttgccttcctcctggccctgaccacacgcttcaccaagcgggtccgcatcatcgagccgctgctggtcttcctcctcgcctacgcagcctacctcactgctgaaatggcctcgctctccgccattcttgcggtgaccatgtgtggcctgggctgtaagaagtacgtggaggccaacatctcccataagtcacgcacaactgtcaaatatacaatgaagactctagccagctgtgctgagaccgtgatcttcatgctgcttggcatctcagccgtggactcttctaagtgggcctgggattctgggctggtgctgggcaccctcatcttcatcctgttcttccgagccctcggcgtagtcctgcagacctgggtgctgaatcagttccggctagtccctctggacaagattgaccaagtggtgatgtcctatgggggcctgcggggggctgtggcctttgctctcgtcatcctactggataggaccaaggtccctgccaaggactactttgtagccaccactattgtagtggtcttcttcacagtcatcgtgcagggcttgaccatcaagccactggtcaaatggctgaaggtgaagaggagtgagcatcacaaacccaccctgaaccaggagctgcatgaacacacttttgaccacattctggctgcagtggaggacgttgtggggcaccatggctaccactactggagggacaggtgggagcagtttgacaagaaatacctgagtcagctgctgatgcgacgatcagcctaccgcatccgggaccagatctgggatgtgtactacaggcttaacatccgggatgccatcagctttgtggaccagggaggccacgtcttgtcttccacaggtctcactctgccttctatgcccagccgcaattctgtggcagaaacttctgtcaccaacctgctgagggagagtggcagtggagcgtgtctggatctgcaggtgattgacacagtacgcagcggccgggatcgtgaggatgctgtgatgcatcatctgctctgcggaggcctctacaagccgcgccgtaggtacaaagccagctgcagtcgccacttcatctcagaggatgcgcaggagcggcaggacaaggaggtcttccagcagaacatgaagcggcggctggagtcctttaagtccaccaagcacaacatctgcttcaccaagagcaagccacgaccccgcaagactggccgcaggaagaaggatggtgtggcgaatgctgaggctacaaatgggaaacatcgaggcctgggctttcaggacacagctgctgtgatattaaccgtggagtctgaggaggaggaggaggagagcgacagttcagagacagagaaggaggacgatgaggggatcatctttgtggctcgtgccaccagtgaggttctccaagagggcaaggtctcaggaagccttgaggtgtgcccaagcccacgaatcattcccccctccccaacctgtgcagaaaaggagctcccctggaagagtgggcagggggacctggcagtgtacgtgtcctcggaaaccaccaagattgtgcctgtggacatgcagacgggttggaaccagagcatctcatccctggagagcctagcgtcccctccctgtaaccaggccccaattctgacctgcctgcctccccatccacggggcactgaagagccccaggtccctctccacctaccttctgatccacgctctagcttcgccttcccaccgagcctggccaaggctggccgctctcgcagtgagagcagcgctgacctcccccagcagcaggagctgcagcccctcatgggccacaaggaccacacccatctcagcccaggcaccgctacctcccactggtgcatccagttcaacagaggcagccggctgtagctcaaggcctcggggaggagcaggaggtggaatccctgtgggaagtgctccctgggtgatgggtagagccctcgaaacttgacatggggccagaagggcctgggttgaagtagtaattgggcttccttggagctagtcagaggggtcacctaagctggtcctcacaggggcctttctcaccacctccctgctcctaacccctgccactttctgtttcattaaggcctctactctggctcaggacccagtccaggccttctacgggctaggcccagagacttgggttgctggtcccccttccctagtgggttttcccggggactctataggcagctgctcctgcccgcaaagcaagagcatcattcctattcttcagtggatgccagccttccctgccccaactccctccccagcactgggtcagtggtgtcctggcagtgaggctccgtgaggggctggcccttagaggaactggggtgggaggtggggcaggcctcacccttgggctttgctgccctgttgggtcagctacccatagtccatttttttagggcagtgggaacctctgcctccacttcctgctttagccccttccctttgctgccaggtattggggtaatatttcctccttttccaagaccaaggccaagaggctgggccaggcttcagttcaggcctgttgcttaactggggtcaccctgggatctgctgctctgggtctaagtctagacctttctgatccttgggtctgggttttttgaggaggggacatagtggcctctgggctgccatgtcaccacctgaacattccccaaacagagaaggaacccagcatctcagggccactgctccattgctctgggggctgggatgcctggctaagcaggggctgacagggtggcaggtgactttctagggatcagcacctgccctgtgttttgtaccttgaacctaagatatattaaacatctctcagatggaaaaaaaaaaa

SEQ ID NO: 132 - DNA, 548 bp, Homo sapiens
ggggacagcaacttccttgatccctgccacgcacgactgaacacagacagcagccgcctcgccatgaagctgctgatggtcctcatgctggcggccctcctcctgcactgctatgcagattctggctgcaaactcctggaggacatggttgaaaagaccatcaattccgacatatctatacctgaatacaaagagcttcttcaagagttcatagacagtgatgccgctgcagaggctatggggaaattcaagcagtgtttcctcaaccagtcacatagaactctgaaaaactttggactgatgatgcatacagtgtacgacagcatttggtgtaatatgaagagtaattaactttacccaaggcgtttggctcagagggctacagactatggccagaactcatctgttgattgctagaaaccacttttctttcttgtgttgtctttttatgtggaaactgctagacaactgttgaaacctcaaattcatttccatttcaataaactaactgcaaatctaaaaaaaaaaaaaaaaaaaaaaaaaaaaaa

SEQ ID NO: 133 - DNA, 2353 bp, Homo sapiens
gctcctccccggcagcggcggcggctcggagcgggctccggggctcgggtgcagcggccagcgggcgcctggcggcgaggattacccggggaagtggttgtctcctggctggagccgcgagacgggcgctcagggcgcggggccggcggcggcgaacgagaggacggactctggcggccgggtcgttggccgcggggagcgcgggcaccgggcgagcaggccgcgtcgcgctcaccatggtcagctactgggacaccggggtcctgctgtgcgcgctgctcagctgtctgcttctcacaggatctagttcaggttcaaaattaaaagatcctgaactgagtttaaaaggcacccagcacatcatgcaagcaggccagacactgcatctccaatgcaggggggaagcagcccataaatggtctttgcctgaaatggtgagtaaggaaagcgaaaggctgagcataactaaatctgcctgtggaagaaatggcaaacaattctgcagtactttaaccttgaacacagctcaagcaaaccacactggcttctacagctgcaaatatctagctgtacctacttcaaagaagaaggaaacagaatctgcaatctatatatttattagtgatacaggtagacctttcgtagagatgtacagtgaaatccccgaaattatacacatgactgaaggaagggagctcgtcattccctgccgggttacgtcacctaacatcactgttactttaaaaaagtttccacttgacactttgatccctgatggaaaacgcataatctgggacagtagaaagggcttcatcatatcaaatgcaacgtacaaagaaatagggcttctgacctgtgaagcaacagtcaatgggcatttgtataagacaaactatctcacacatcgacaaaccaatacaatcatagatgtccaaataagcacaccacgcccagtcaaattacttagaggccatactcttgtcctcaattgtactgctaccactcccttgaacacgagagttcaaatgacctggagttaccctgatgaaaaaaataagagagcttccgtaaggcgacgaattgaccaaagcaattcccatgccaacatattctacagtgttcttactattgacaaaatgcagaacaaagacaaaggactttatacttgtcgtgtaaggagtggaccatcattcaaatctgttaacacctcagtgcatatatatgataaagcattcatcactgtgaaacatcgaaaacagcaggtgcttgaaaccgtagctggcaagcggtcttaccggctctctatgaaagtgaaggcatttccctcgccggaagttgtatggttaaaagatgggttacctgcgactgagaaatctgctcgctatttgactcgtggctactcgttaattatcaaggacgtaactgaagaggatgcagggaattatacaatcttgctgagcataaaacagtcaaatgtgtttaaaaacctcactgccactctaattgtcaatgtgaaaccccagatttacgaaaaggccgtgtcatcgtttccagacccggctctctacccactgggcagcagacaaatcctgacttgtaccgcatatggtatccctcaacctacaatcaagtggttctggcacccctgtaaccataatcattccgaagcaaggtgtgacttttgttccaataatgaagagtcctttatcctggatgctgacagcaacatgggaaacagaattgagagcatcactcagcgcatggcaataatagaaggaaagaataagatggctagcaccttggttgtggctgactctagaatttctggaatctacatttgcatagcttccaataaagttgggactgtgggaagaaacataagcttttatatcacagatgtgccaaatgggtttcatgttaacttggaaaaaatgccgacggaaggagaggacctgaaactgtcttgcacagttaacaagttcttatacagagacgttacttggattttactgcggacagttaataacagaacaatgcactacagtattagcaagcaaaaaatggccatcactaaggagcactccatcactcttaatcttaccatcatgaatgtttccctgcaagattcaggcacctatgcctgcagagccaggaatgtatacacaggggaagaaatcctccagaagaaagaaattacaatcagaggtgagcactgcaacaaaaaggctgttttctctcggatctccaaatttaaaagcacaaggaatgattgtaccacacaaagtaatgtaaaacattaaaggactcattaaaaagtaaaaaaaaaaaaaaaaaaaaaaaaaaaaaaaaaaaa

SEQ ID NO: 134 - DNA, 2543 bp, Homo sapiens
gaggcgggcaaggcgggcgccgaggtttgcaaaggctcgcagcggccagaaacccggctccgagcggcggcggcccggcttccgctgcccgtgagctaaggacggtccgctccctctagccagctccgaatcctgatccaggcgggggccaggggcccctcgcctcccctctgaggaccgaagatgagcttcctcttcagcagccgctcttctaaaacattcaaaccaaagaagaatatccctgaaggatctcatcagtatgaactcttaaaacatgcagaagcaactctaggaagtgggaatctgagacaagctgttatgttgcctgagggagaggatctcaatgaatggattgctgtgaacactgtggatttctttaaccagatcaacatgttatatggaactattacagaattctgcactgaagcaagctgtccagtcatgtctgcaggtccgagatatgaatatcactgggcagatggtactaatattaaaaagccaatcaaatgttctgcaccaaaatacattgactatttgatgacttgggttcaagatcagcttgatgatgaaactctttttccttctaagattggtgtcccatttcccaaaaactttatgtctgtggcaaagactattctaaagcgtctgttcagggtttatgcccatatttatcaccagcactttgattctgtgatgcagctgcaagagggggcccacctcaacacctcctttaagcactttattttctttgttcaggagtttaatctgattgataggcgtgagctggcacctcttcaagaattaatagagaaacttggatcaaaagacagataaatgtttcttctagaacacagttacccccttgcttcatctattgctagaactatctcattgctatctgttatagactagtgatacaaactttaagaaaacaggataaaaagatacccattgcctgtgtctactgataaaattatcccaaaggtaggttggtgtgatagtttccgagtaagaccttaaggacacagccaaatcttaagtactgtgtgaccactcttgttgttatcacatagtcatacttggttgtaatatgtgatggttaacctgtagcttataaatttacttattattcttttactcatttactcagtcatttctttacaagaaaatgattgaatctgttttaggtgacagcacaatggacattaagaatttccatcaataatttatgaataagtttccagaacaaatttcctaataacacaatcagattggttttattcttttattttacgaataaaaaatgtatttttcagtatccttgagatttagaacatctgtgtcacttcagataacattttagtttcaagtttgtatggtagtgtttttatagataagatacgtctattttttcaaaattcatgattgcagtttaaatcatcatatgacgtgtgggtgggagcaaccaaagttatttttacagggactttattttttgatctttatttgagattgttttcatatctatctaaattattaggagtgtgtgtatcagaagtaattttttaatgtcttctaaggatggtcttccaggcttttaaactgaaaagcttaattcagatagtagcttttggctgagaaaaggaatccaaaatattaataaatttagatctcaaaaccactatttttattatttcattatttttcagaggccttaaaattctggataagagaatggaggaaaatactcagagtacttgattattttatttccttttattaaaaaattacttctatgtttttattgtctcttgagccttagttaagagtagtgtagaaatgcatgaacttcatcctaataaggataaaacttaaggaaaaccacaataaaccatgaaggtgtacacatcctataacacagataaagttttggtgtgctacctattcttgagagagtgagtgagtgtatgtgtttaaaggaaacaaaatgggagaaataagttttaaaaaaatcctcattttgttaatattcaaaagatggactgagcttccacttgggttttatcttgttttaattgtttttgtatcaaaacttgaaattcctctatttctattgggatataaaagccttccccttcagtgaagaaaacatttattttttatttgattcctaggatttagtaaactctagctgtctatttaaaatgtactgaggcacaacaagtattatactggaagacttgccaaactggcaaagctttaagttcatcagcattctatgtggttcagagctgtgatttttgcaaagtattttaccaacctcctcgatggctttgataaaggttagatttgatgttttttttttagatttatttttcttactccactaaactataaagaaaataattacttagaaactccattttaaataatcatttcctagaaattcttaaatatatacagaattttaaagaaaacatttcatctgatttagttagcatccacatatcattgaggaattaaagtgtgggacagtcattatt

SEQ ID NO: 135 - DNA, 6147 bp, Homo sapiens
gcgggcgccggcaatcgagtggcttcctggccatggagaggagatctggacccgaggacgccagggactcctctccgtctccctggaccgctgtgtaggcacctgagttaacggacgctaagcggggtaggggaagtaacagtgtatcatgtatgccactgattccaggggacactcccctgctttcctccaacctcagaatggaaatagtcgtcacccatctggctatgttccagggaaggttgtcccattgcgtccccctcctcctccaaagagtcaagcttcagccaaatttacctccatcagacgagaagaccgggcaaccttcgcattctcacctgaagaacagcaagcccagagagaaagtcaaaagcaaaagagacacaaaaatactttcatttgttttgctattactagtttctcattttttattgcacttgcaatcattttaggaatatcctcaaaatatgctccagatgaaaattgcccagatcaaaatcctcgtctcaggaattgggatccaggacaagattctgcaaagcaagttgttatcaaggagggagatatgctccgtctgacctcagacgccaccgtgcattctatagtcattcaggatggaggactgcttgtatttggggacaataaagatggatccagaaatattactttgaggactcattacatcctgatccaggatggtggggcgcttcatattggagcagaaaaatgccgctataaatccaaagcgacaattaccttgtatggcaagtcagatgaaggtgaaagtatgccaacatttggcaaaaagtttattggtgtggaagctggcgggacactggagttacatggggcacggaaggcatcgtggacgttgttggcaaggaccctgaattcctcaggcttgccctttgggtcctatacctttgaaaaggacttttcccggggcctcaatgtgagggtcattgaccaagacacggccaaaattttggaaagtgagagatttgatacccatgaataccgcaatgagagcaggcggcttcaggagtttctgagattccaggatccaggtcggattgttgccatagctgtcggggattcagccgctaaaagtctcttacaaggaaccatccagatgatccaggaacggttgggaagtgaactgatccaaggactgggctacaggcaagcttgggctttagttggtgtcattgatggtggaagcacttcttgcaatgaatccgtgagaaactatgaaaatcatagcagtggcgggaaggctcttgcccaaagagaattttatactgtggatggccagaagttctctgtgacagcttatagtgaatggattgaaggcgtttctctttcaggattccgggtagaggttgtagatggagtgaagctaaatttgctagatgatgttagtagttggaaacctggagaccagattgtggtcgcaagcacagactattccatgtaccaagcagaggagttcactcttcttccctgttctgaatgcagccattttcaggtcaaagtcaaagaaacccctcagttcctgcacatgggtgagatcatagacggtgtagacatgagagctgaggttggaattcttacccggaatattgtgatccaaggagaagtggaggactcatgctacgcagaaaatcagtgccaattttttgattatgatacctttgggggacacattatgataatgaaaaattttacttcagtccatctttcttatgtggaattgaaacacatgggtcagcagcagatggggcgataccctgttcattttcacctgtgtggtgacgtggattataaaggaggatacagacatgcaacatttgtggacggcctgtctattcatcacagcttctcaaggtgcatcactgtgcatgggacaaatggcttgctaataaaagacaccattgggtttgacacactaggtcattgtttctttttggaagatggtattgaacagaggaatactttgttccacaatctgggactcctcaccaagccgggtactctcctgcccaccgataggaacaactccatgtgtaccaccatgcgagataaagtgtttggaaattacattcctgtgcctgctactgactgtatggctgtttcaactttctggattgctcatcccaacaataatctgattaataatgcagctgcaggctcacaggatgctggaatatggtatttattccacaaggaaccaactggggaatccagtggattgcagctcttggcaaaaccagaactcactccattgggtatattttataacaacagggtccattcaaattttaaggctggcttatttattgacaaaggtgtcaaaacaaccaactctagtgctgctgacccaagggaatacctctgtttggacaatagtgcaagatttcgacctcatcaggatgcaaaccccgaaaaaccacgtgttgctgctctaattgacaggctcattgcttttaaaaataatgataatggagcttgggtcagaggaggagatattatcgttcaaaattcagcatttgcagataatggaataggactgacctttgccagtgatggaagcttcccaagtgatgaaggttccagccaagaggtatctgaatctctctttgttggggagagcaggaattacggctttcagggtggtcagaacaagtatgtaggcactggaggaatagaccagaagcctcgaacattacccaggaacaggacgttcccaattagaggctttcagatttatgatgggcccattcatctcacaaggagcactttcaaaaaatatgtgccaactccagataggtacagcagtgcaattggcttcctcatgaagaattcctggcagataacccccaggaataatatctccctcgtgaagtttggtccacatgtctctctgaatgtcttttttggaaagcctggtccctggtttgaagattgtgagatggatggtgataagaactccatattccatgacattgatggctctgtgacaggatacaaggatgcttatgtgggaagaatggacaactacctgatccgccatccaagctgtgtaaatgtgtctaagtggaatgcagtgatctgcagtgggacctatgcacaggtctatgtacagacatggagcactcagaatctttctatgaccattacacgagatgagtatccgtccaaccctatggtgctccgaggtattaatcagaaggctgcctttccacagtaccagcctgtcgtcatgctggagaagggttataccatccactggaatgggccggcaccacggactacatttctatacctcgtcaacttcaacaagaatgactggattcgagttggcctttgctatccatcaaacacaagttttcaagttacctttggctatttgcagcggcagaatggctcattatccaaaatcgaagaatatgagcctgtgcattcactggaagaactgcaaagaaagcaatccgagaggaaattctattttgactccagcacggggttactgtttttgtatctcaaagccaaaagccacaggcatggccacagttactgttcatctcagggatgtgaaagagtcaagatccaagcagccacagactcaaaggacatcagtaactgcatggccaaagcatacccacagtactacagaaagccgtcagtggtcaagcggatgccggccatgctcactggactctgtcaaggctgtggcactcggcaggtggtgtttactagtgatcctcataaaagttacctccctgtgcaattccagtcacctgataaagcagaaacccagcgtggagacccgtctgttatttctgtcaatggcactgactttaccttccgaagtgcaggcgtcctcctccttgttgtggatccgtgcagcgttccattccgcttgacggaaaaaacggtttttcctcttgctgatgtcagtcgcattgaagagtatttaaaaacaggcatccctccaaggtccattgttctgttgagcacaagaggagaaataaagcagttaaacatttcacacttactagtacctctgggattagccaaaccagctcatctttatgacaaagggagtaccatatttttgggattcagtggaaactttaaaccatcatggactaagctatttaccagtcctgctggacagggccttggggtgcttgaacaattcatacctttgcagctggacgaatatggttgtcccagagccaccactgtccgcagaagagacctggaactgctaaagcaagcttcaaaagcacattagagactaactgtaacttaagtgctgggggaaaaaaaatgtgaactaacttatttaatttatggcattttaaaatgacactgttaacccaacggaaccattttccagtttgatacagaatggggagaaaagaaagcgtttgaaattattgcttggataccagcttcatgcaccttctagttgtacaaaatgttaaagacgttgtttgtatttgtaaggctggtgtattcagagagcagatctcttattcctcactttccacccccgtattttgtaatgaccatgagcaatgtttttactttttgtataatggggtggggtggagtgggggcttctgagagtcagcctgaggtctttagaggaccagctattgtagcaccttggatacttgaagtttaatgctcagttgggtcgggtggcagttgacttggtggctggcatgttcagcagtgcctggggccctgtttctgggcagcctttgaggattttctatgatattgaatgacagttttaagtggcaactcaggcccagctcatgcccttttttgcctggacatgtgctatttttattcacttatatatcaattacttgtaagggttaaactttcaaacaggaagtatattgggacaaaagggctcttggggattagatatccctttaatctgtgaccatggggcaaaaaattttcctgcagcaaaagtctgaggctgttgggaccatttttgcagctttaatccttagcctcttttgactgtatatttgtgtttaaaatgcagagctcaactgaatatttccttttttgttttgttttgttttgttttaagaagtaggttgttttcctgaaccgtaaacttgtatcattttaacttgcacaaaggaagtctgttcttggtattgctcttgcacttgggttttttgttattgttttgtgtggattttttaaagcttttctgttcaccctcctgccaggaaaatcccagaaagcttaatgataccccaaaatgattacacccagggaggaaaaaaaggagcgctttctagggtcagaatcgtggagagaatactcagaacatgaacctctttaaagccttgcaggaatgagtcactcttacttaatgaaatgttaaagccaattaaaaagcatgctgtgatgcccagcttccctttccacagggtgcatgcgtctcctgctggtgaatcacatgcggcaagaggcaactggctccacagcctgggatgctgccgtaccaagaggaaagaagcagcaaaatgcctttacgttgttctaaacccccgacgcataaagtgtagaggagggatggccaagggtgggtggtagaaagtgtgttcaggctgacactggcaatgagtacagataatttcactttcctcttccaggggcaaaggctgatggcctctacctttgtatccaggagaaactgcagagcagccctgtgactttacaaaatatgctacctcaaagtgctaccgataaacctttctaattgtaagtgcccttactaagggcacatgtcttaatcaaagttagttttttgttttctggtttgttttttttttttttgtatattgatgaatgagatcttacctattaaatatattattggaaaaaaaaaaaaaaaaaaaattaaagtttgagtgtgtgtgtgtgtgtgtgtgtgtgtgtgtgtgtgtgtgttttatgacttaaatatctttacgtgtgttttttagagcttggttctttaaagatttggagaagatatgtaaattaccaaggcacttggtttttctgttttatatactaataatcagggcctaagttaaataaaaatatgtgtgcatgtatttt

SEQ ID NO: 136 - DNA, 2728 bp, Homo sapiens
atcttggcttcccggggaaaggcggcgtgaggggaagaagttgtagggtgggggcaggagtgaggaggagggaagagagagggggaggaggccgcggcggggcagggcggggactgcctgcctgcctgggttgcggaagtgatagccgccgaccgagcctgctgctttcttgctactgcttcggcttcccggctaccccccggacggtgaaggcggcccagctgtggatggtcagatagcccttgtttcccgccgccaatctctggcccatagcagcacggagcagacggcggcagcagcagcagcaggcgaggaggaagatggcgggacggctgccggcctgtgtggtggactgtggcacggggtatacaaaactaggatatgctggaaatacagaaccacagtttatcatcccttcctgtattgctattaaggagtcagcaaaagtgggtgatcaagctcaaaggagggtgatgaaaggtgttgatgacctagacttcttcattggtgatgaagcaatagaaaaacctacatatgcaacaaagtggccaatccgccatggtatagttgaagattgggacttaatggaaaggtttatggagcaagtgatctttaaatatttaagggcagaacctgaagaccattattttcttttgactgaacctccattgaatactccagaaaacagggaatatactgctgaaataatgtttgagtccttcaatgttccaggcttgtacattgctgtgcaggctgttcttgccttagctgcatcttggacctcaagacaagtaggagaacggacgttgaccggtacggtaatagacagtggagatggtgtcactcatgtcattcctgtggctgaagggtatgtgattggcagctgtattaaacacattccaatcgcaggacgagatataacatattttattcagcaactgctgagagaccgagaagtaggaatccctccagaacaatccttggaaactgctaaggcagtaaaggagcgctatagttatgtctgcccagatttagtaaaagaatttaacaagtatgatacagatgggtcaaaatggattaaacagtatactggaatcaatgctatctcaaagaaagagttttctatcgatgttggttatgagagatttttgggacctgaaatcttttttcatccagagtttgctaatccagactttacacaacctatctcagaagttgtagatgaagtaattcagaattgtcctattgatgtcagacgtcctctctacaagaatattgtcctctctggaggttcaaccatgttcagggactttggacgtcgcttgcaaagagatttgaaaagaactgtagatgcccggctgaaattaagtgaggaattgagtggtggtagattgaagccaaaacctattgatgtacaagtcattacacaccacatgcagcgatatgcagtttggtttggaggatcaatgctggcttccacgcctgagttctaccaagtatgccacaccaaaaaggattatgaagaaattggacctagcatttgtcgtcacaatccagtgtttggagtcatgtcgtaaaattggcttcatagttattggggttagggaggtggggaagagataatctttctgattacctgttttgtctggatggctggttttgaggttttaaacctgacttgaaatagtaacaccaaacatgattatacaggaatattttaataagtgtatcaccatgcagatgtagaagagagcgaaagtgattgtgtttttctttagattgaatatttgaatcttatgtgtaacaaaaagaagtgggttttagttctttctgtgccctgatattttgtatattaatgaattatccaagattcgatgggatttatcagtgtgtagatagctctataatgcttgaattgtacacttctaagtgtgcagtgcaagagcttgtttatatttcatactttttatactttgaggaaaaaaagtcaaagaaaaattgtatttgagggaaaaaaccatgaccaagtaaaggataaattcaaaaaatagcctcatgagacttggcatacacactcgtgggattccagttattatggagtgcttccatccctctccaccccttccccccaaaaggttttctttgcaagtgcttttggaactaagagctagtatcttggattaactgatgcctgctagtgctttctgattactcgcattctgtttcttgctttaaaagaagagtaaagacaagagtgttggaccagtattgcagttctgtagtgtcatttcttataaaaaacaaaacaacaacaataatttatcaaaattggcatatttaaagcctaacattctaataaaggcacaaatttctttttaatacttgtttcagcctctttaatctctttataagttaactaataaatctattttcttcagacttctgcaatagttctttaaaatcacaacagttagcaagctgacttttgtaatgtgctcaatacaaatacttgtgaacttttaatatgttgagtgctttcattttgataactggatctccatttgatattttcatttgtataactcatttgcagtctgaaaattttttttagtgccagtccctgaacatatcattgaaagttaattttctttgcattttaaaatatctggattatgaagaaaaagtgatgaaaataaattaaaactgaattacaaaaaaaaaaaaaaaa

SEQ ID NO: 137 - DNA, 2484 bp, Homo sapiens
gccgggccgagcgcggagccatgggccgggctggcaccgggaccgggggcgaggcggtggccgcggtggtggcggggccgctgctgctgctgctgcttgcccggcccccgcctgcctccgccggctacagcgggaagagcgaggtggggctggtgtccgagcacttctcacaggccccgcagaggctgtccttctacagctggtatggcagtgccaggctcttccgcttccgcgtgcccccagatgctgtgcttctacgctggctcctgcaggtctcccgggagagcggcgctgcctgcaccgacgcggagatcaccgtgcacttccgttccggcgcccctccggtcatcaacccgctgggcaccagcttcccggacgacaccgcggtgcagccctccttccaggtcggggtgccgctgagcaccgcaccgagaagcaatgcctccgtcaacgtttcccacccggcccccggggactggttcgtggccgcccacctgcccccctcatcccagaagatcgagttgaagggcttggctcccacctgtgcctacgtcttccagcctgaactgctggtcacgcgggtggtcgagatttccatcatggagccggacgtgccccttcctcagaccctcctctcccatcccagctacctcaaggtctttgtccccgattacacgcgggagcttctgctggagctgcgggactgcgtgtccaatgggagcctgggctgccccgtgcgtctcaccgtgggcccggtcaccctgcctagcaacttccagaaggtgctcacctgcaccggtgccccctggccctgccgcctgctgctgccctcaccgccctgggaccggtggctgcaagtgacagctgagagcctggtggggcccctcgggacagtggctttcagtgctgtagctgccctcacagcttgcaggccacggagcgtgaccgtccagccccttctgcagagcagccaaaaccagagcttcaatgcctcctctggtctgctgtccccgagccccgaccaccaggacctgggcaggagtggcagggtggaccgcagccccttctgcctcacaaactacccagtcacgcgggaggacatggacgtggtgtcggtgcacttccagcccctggacagggtctcggtgagggtgtgttcggacacgccctccgtgatgcggctgcgcctgaacaccggcatggacagcgggggttccctcaccatctccctgcgggccaacaagacagagatgcggaacgagaccgtcgtagtggcctgcgtgaatgctgcctcgcccttccttggcttcaatacttcgctcaactgcaccacagccttcttccagggctaccctttgtctctgagcgcctggtctcgcagggccaacctcatcatcccctacccagagacagacaactggtacctctccctgcagctcatgtgccctgagaatgctgaggactgtgagcaggctgtggtccacgtggagaccaccttgtacctggtgccctgtttgaacgattgtggaccctatggccagtgcctcctgctccgcagacacagctacctgtatgccagctgcagctgcaaggcaggctggcgtgggtggagctgcacggacaacagcacagcccagacggtggcccagcagagggcggccacactgctgctcacgctcagcaacctcatgttcctggcccccatcgccgtctcagtgcggcgattcttcctggtggaggcctccgtctacgcctacaccatgttcttctccacgttctaccacgcctgcgaccagcccggggaggcggtgctgtgcatcctcagctacgacacgctgcagtactgcgacttcttgggctccggggcggccatctgggtcaccatcctgtgcatggcacggctcaagacagtcctgaaatacgtgctgtttcttctgggtacactggtcatcgccatgtccttgcagctggaccgcaggggcatgtggaacatgctggggccctgcctctttgccttcgtgatcatggcctccatgtgggcttaccgctgcgggcaccggcgccagtgctaccccacctcgtggcagcgctgggccttctacctcctgcccggcgtctctatggcctctgtgggcatcgccatctacacctccatgatgactagcgacaactactactacacccacagcatctggcacatcctgctggccgggagcgcagccttgctgctgccgccacctgaccagcccgccgagccctgggcctgctcgcagaaattcccctgccactatcagatctgcaagaacgatcgggaggaactgtacgcagtgacgtgacactggcctggggacagctgctgctctgatgacctcttcagccaggagctgtatcgagggggaggcgcctggtccagccctggacagattgatttccagctgaataaattggcctagataccaaaaaaaaaaaaaaaaaaaaaaaaaa

SEQ ID NO: 138 - DNA, 2043 bp, Homo sapiens
cgcctgcaggtcggccatggccagtacggttagccccagcaccatagctgagaccccagagccacctccattgtctgaccacatccgaaatgctgctgacatctcagtcattgtcatctattttctggtggtgatggctgttgggctgtgggcgatgctgaagaccaaccgaggtactataggaggcttcttcctcgctggtcgtgatatggcctggtggccgatgggcgcctctctctttgccagtaacatcggcagcaaccactatgtggggctggctgggacaggagcagcttcaggagtcgccaccgtaacatttgaatggacttcctcagtaatgttgctgattcttgggtggatctttgtccctatctacatcaagtcgggggtgatgaccatgccggaatatctcaagaagcggtttggtggggagcgactccaggtctacctctccatcctctccctcttcatctgtgtggttttgttaatttctgcagacatatttgctggagccatattcatcaagctggccttgggattggacctttacctggcaatcttcatcctcttggctatgactgctgtttacaccaccactgggggcttggcctcggtgatttacacagacaccctccagaccatcatcatgctgattggctcttttattctcatggggtttgcatttaacgaagttggaggttatgagagctttaccgagaagtacgtgaatgccaccccatccgtagtcgagggggacaacttgacaatcagtgccagttgctacacacctcgggcggactccttccatatcttccgagatgctgtgactggggacattccatggccaggaattatatttggaatgcccattacagctttgtggtactggtgcacaaatcaggtcattgtgcagcgctgcctgtgtggcaaggacatgtctcacgtgaaggccgcttgcattatgtgtgcttacctgaagctgctgcccatgttcctcatggtgatgccggggatgatcagccgcatcctgtacacagatatggtagcatgtgtggtaccttctgaatgcgtgaaacactgtggcgttgatgttggctgcaccaactacgcataccccacgatggtgctggaactgatgccccaaggactgcgaggcctgatgctttcggtcatgctggcctctctcatgagctccctgacctccatcttcaacagcgccagcaccctcttcaccattgacctctacaccaagatgcggaagcaagcgtcggagaaagagctcctgatagctggacggatatttgttcttctattaactgttgtgagcattgtgtgggtcccactggtacaagtttctcaaaatggacaactaatccattacacagaatcaatttctagctaccttgggcctccaattgcagctgtctttgtgcttgccatcttctgtaaaagagtcaatgaacagggagcattctggggtctaatggttggacttgcaatgggcctcattcgtatgataacagagtttgcttatggaacagggagttgcttggctcccagtaactgtcccaagattatctgtggagtgcactatctgtacttttccatcgttctcttttttgggtccatgctggtcaccctgggaatttccctcttaacaaaacccattcctgatgtacatctgtaccgcctgtgctgggttcttcggaacagtacagaggagcgaatcgatatagatgcagaagagaaaagtcaggaagaaacagatgatggtgttgaagaagattatcctgagaaatcacgtggatgcctcaagaaagcttatgacttgttctgcggtttgcagaagggacccaagctaaccaaggaggaggaggaagccttgagcaagaagctcacagacacgtctgagaggccctcgtggaggacaatagtgaacatcaacgccatcctcctcctggctgtggtggtctttattcacggctactatgcctgaactctatctgagccattagaataatgaataattcttaaaaaaaaaaa

SEQ ID NO: 139 - DNA, 2507 bp, Homo sapiens
cagcacaccccggcacctcctctgcggcagctgcgcctcgcaagcgcagtgccgcagcgcacgccggagtggctgtagctgcccggcgcggcgccgccctgcgcgggctgtgggctgcgggctgcgcccccgctgctggccagctctgcacggctgcgggctctgcggcgcccggtgctctgcaacgctgcggcgggcggcatgggataacgcggccatggtgcgccgagatcgcctccgcaggatgagggagtggtgggtccaggtggggctgctggccgtgcccctgcttgctgcgtacctgcacatcccaccccctcagctctcccctgcccttcactcatggaagtcttcaggcaagtttttcacttacaagggactgcgtatcttctaccaagactctgtgggtgtggttggaagtccagagatagttgtgcttttacacggttttccaacatccagctacgactggtacaagatttgggaaggtctgaccttgaggtttcatcgggtgattgcccttgatttcttaggctttggcttcagtgacaaaccgagaccacatcactattccatatttgagcaggccagcatcgtggaagcgcttttgcggcatctggggctccagaaccgcaggatcaaccttctttctcatgactatggagatattgttgctcaggagcttctctacaggtacaagcagaatcgatctggtcggcttaccataaagagtctctgtctgtcaaatggaggtatctttcctgagactcaccgtccactccttctccaaaagctactcaaagatggaggtgtgctgtcacccatcctcacacgactgatgaacttctttgtattctctcgaggtctcaccccagtctttgggccgtatactcggccctctgagagtgagctgtgggacatgtgggcagggatccgcaacaatgacgggaacttagtcattgacagtctcttacagtacatcaatcagaggaagaagttcagaaggcgctgggtgggagctcttgcctctgtaactatccccattcattttatctatgggccattggatcctgtaaatccctatccagagtttttggagctgtacaggaaaacgctgccgcggtccacagtgtcgattctggatgaccacattagccactatccacagctagaggatcccatgggcttcttgaatgcatatatgggcttcatcaactccttctgagctggaaagagtagcttccctgtattacctcccctactcccttatgtgttgtgtattccacttaggaagaaatgcccaaaagaggtcctggccatcaaacataattctctcacaaagtccactttactcaaattggtgaacagtgtataggaagaagccagcaggagctctgactaaggttgacataatagtccacctcccattactttgatatctgatcaaatgtatagacttggctttgttttttgtgctattaggaaattctgatgagcattactattcactgatgcagaaagacgttcttttgcataaaagacttttttttaacactttggacttctctgaaatatttagaagtgctaatttctggcccacccccaacaggaattctatagtaaggaggaggagaaggggggctccttccctctcctcgaatgacgttatgggcacatgccttttaaaagttctttaagcaacacagagctgagtcctctttgtcatacctttggatttagtgtttcatcagctgtttttagttataaacattttgttaaaatagatattggtttaaatgatacagtattttaggtatgatttaagactatgatttacctatacattatatatattttataaagatactaaaccagcatacccttactctgccagagtagtgaagctaattaaacacgtttggtttctgaataaattgaactaaatccaaactatttcctaaaatcacaggacattaaggaccaatagcatctgtgccagagatgtactgttattagctgggaagaccaattctaacagcaaataacagtctgagactcctcatacctcagtggttagaagcatgtctctcttgagctacagtagaggggaagggattgttgtgtagtcaagtcaccatgctgaatgtacactgattcctttatgatgactgcttaactccccactgcctgtcccagagaggctttccaatgtagctcagtaattcctgttactttacagacaggaaagttccagaaactttaagaacaaactctgaaagacctatgagcaaatggtgctgaatactttttttttaaagccacatttcattgtcttagtcaaagcaggattattaagtgattatttaaaattcgtttttttaaattagcaacttcaagtataacaactttgaaactggaataagtgtttattttctattaataaaaatgaattgtgacaaaaaaaaaaaaaaaaaaaaaaaaaaaaaaaaaaaaaaaaaaaaaaaaaa

SEQ ID NO: 140 - DNA, 1644 bp, Homo sapiens
ccggctcagcctctcacttgtcagaggccggggaagagaagcaaagcgcaacggtgtggtccaagccggggcttctgcttcgcctctaggacatacacgggaccccctaacttcagtcccccaaacgcgcaccctcgaagtcttgaactccagccccgcacatccacgcgcggcacaggcgcggcaggcggcaggtcccggccgaaggcgatgcgcgcagggggtcgggcagctgggctcgggcggcgggagtagggcccggcagggaggcagggaggctgcagagtcagagtcgcgggctgcgccctgggcagaggccgccctcgctccacgcaacacctgctgctgccaccgcgccgcgatgagccgcgtggtctcgctgctgctgggcgccgcgctgctctgcggccacggagccttctgccgccgcgtggtcagcggccaaaaggtgtgttttgctgacttcaagcatccctgctacaaaatggcctacttccatgaactgtccagccgagtgagctttcaggaggcacgcctggcttgtgagagtgagggaggagtcctcctcagccttgagaatgaagcagaacagaagttaatagagagcatgttgcaaaacctgacaaaacccgggacagggatttctgatggtgatttctggatagggctttggaggaatggagatgggcaaacatctggtgcctgcccagatctctaccagtggtctgatggaagcaattcccagtaccgaaactggtacacagatgaaccttcctgcggaagtgaaaagtgtgttgtgatgtatcaccaaccaactgccaatcctggccttgggggtccctacctttaccagtggaatgatgacaggtgtaacatgaagcacaattatatttgcaagtatgaaccagagattaatccaacagcccctgtagaaaagccttatcttacaaatcaaccaggagacacccatcagaatgtggttgttactgaagcaggtataattcccaatctaatttatgttgttataccaacaatacccctgctcttactgatactggttgcttttggaacctgttgtttccagatgctgcataaaagtaaaggaagaacaaaaactagtccaaaccagtctacactgtggatttcaaagagtaccagaaaagaaagtggcatggaagtataataactcattgacttggttccagaattttgtaattctggatctgtataaggaatggcatcagaacaatagcttggaatggcttgaaatcacaaaggatctgcaagatgaactgtaagctcccccttgaggcaaatattaaagtaatttttatatgtctattatttcatttaaagaatatgctgtgctaataatggagtgagacatgcttattttgctaaaggatgcacccaaacttcaaacttcaagcaaatgaaatggacaatgcagataaagttgttatcaacacgtcgggagtatgtgtgttagaagcaattccttttatttctttcacctttcataagttgttatctagtcaatgtaatgtatattgtattgaaatttacagtgtgcaaaagtattttacctttgcataagtgtttgataaaaatgaactgttctaataaaaaaaaaaaaaaaaaaaa

SEQ ID NO: 141 - DNA, 10244 bp, Homo sapiens
gcagccatgagcggcagcagcggcggagccgccgcccccgccgcgtcctccggccccgccgcggcggccagcgcggctggctcgggctgcgggggcggtgccggcgagggggcagaggaggcggccaaggacctggccgacatcgcggccttcttccgatccgggtttcgaaaaaacgatgaaatgaaagctatggatgttttaccaattttgaaggaaaaagttgcatacctttcaggtgggagagataaacgtggaggtcccattttaacgtttccggcccgcagcaatcatgacagaatacgacaggaggatctcaggagactcatttcctatctagcctgtattcccagcgaggaggtctgcaagcgtggcttcacggtgatcgtggacatgcgtgggtccaagtgggactccatcaagccccttctgaagatcctgcaggagtccttcccctgctgcatccatgtggccctgatcatcaagccagacaacttctggcagaaacagaggactaattttggcagttctaaatttgaatttgagacaaatatggtctctttagaaggccttaccaaagtagttgatccttctcagctaactcctgagtttgatggctgcctggaatacaaccacgaagaatggattgaaatcagagttgcttttgaagactacattagcaatgccacccacatgctgtctcggctggaggaacttcaggacatcctagctaagaaggagctgcctcaggatttagagggggctcggaatatgatcgaggaacattctcagctgaagaagaaggtgattaaggcccccatcgaggacctggatttggagggacagaagctgcttcagaggatacagagcagtgaaagctttcccaaaaagaactcaggctcaggcaatgcggacctgcagaacctcttgcccaaggtgtccaccatgctggaccggctgcactcgacacggcagcatctgcaccagatgtggcatgtgaggaagctgaagctggaccagtgcttccagctgaggctgtttgaacaggatgctgagaagatgtttgactggatcacacacaacaaaggcctgtttctaaacagctacacagagattgggaccagccaccctcatgccatggagcttcagacgcagcacaatcactttgccatgaactgtatgaacgtgtatgtaaatataaaccgcatcatgtcggtggccaatcgtctggtggagtctggccactatgcctcgcagcagatcaggcagatcgcgagtcagctggagcaggagtggaaggcgtttgcggcagccctggatgagcggagcaccttgctggacatgtcctccattttccaccagaaggccgaaaagtatatgagcaacgtggattcatggtgtaaagcttgcggtgaggtagaccttccctcagagctgcaggacctagaagatgccattcatcaccaccagggaatatatgaacatatcactcttgcttattctgaggtcagccaagatgggaagtcgctccttgacaagctccagcggcccttgactcccggcagctccgattccctgacagcctctgccaactactccaaggccgtgcaccatgtcctggatgtcatccacgaggtgctgcaccaccagcggcagctggagaacatctggcaacaccgcaaggtccggctgcatcagaggctgcagctgtgtgttttccagcaggacgttcagcaggtgctagactggatcgagaaccacggagaagcatttctgagcaaacatacaggtgtggggaaatctcttcatcgggccagagcattgcagaaacgtcatgaagattttgaagaagtggcacagaacacatacaccaatgcggataaattactggaagcagcagaacagctggctcagactggggaatgtgaccccgaagagatttatcaggctgcccatcagctggaagaccggattcaagatttcgttcggcgtgttgagcagcgaaagatcctactggacatgtcagtgtcctttcacacccatgtgaaagagctgtggacgtggctggaggagctgcagaaggagctgctggacgacgtgtatgccgagtcggtggaggccgtgcaggacctcatcaagcgctttggccagcagcagcagaccaccctgcaggtgactgtcaacgtgatcaaggaaggggaggacctcatccagcagctcagggactctgccatctccagtaacaagaccccccacaacagctccatcaaccacattgagacggtgctgcagcagctggacgaggcgcagtcgcagatggaggagctcttccaggagcgcaagatcaagctggagctcttcctgcagctgcgcatcttcgagagggacgccatcgacattatctcagacctcgagtcttggaatgatgagctttctcagcaaatgaatgacttcgacacagaagatctcacgattgcagagcagcgcctccagcaccatgcagacaaagccttgaccatgaacaacttgacttttgacgtcatccaccaagggcaagatcttctgcagtatgtcaatgaggtccaggcctctggtgtggagctgctgtgtgatagagatgtagacatggcaactcgggtccaggacctgctggagtttcttcatgaaaaacagcaggaattggatttagccgcagagcagcatcggaaacacctggagcagtgcgtgcagctgcgccacctgcaggcagaagtgaaacaggtgctgggttggatccgcaacggagagtccatgttaaatgccggacttatcacagccagctcgttacaagaggcagagcagctccagcgagagcacgagcagttccagcatgccattgagaaaacacatcagagcgcgctgcaggtgcagcagaaggcagaagccatgctacaggccaaccactacgacatggacatgatccgggactgcgccgagaaggtggcgtctcactggcaacagctcatgctcaagatggaagatcgcctcaagctcgtcaacgcctctgtcgctttctacaaaacctcagagcaggtctgcagcgtcctcgagagcctggaacaggagtacaagagagaagaagactggtgtggcggggcggataagctgggcccaaactctgagacggaccacgtgacgcccatgatcagcaagcacctggagcagaaggaggcattcctgaaggcttgcacccttgctcggaggaatgcagacgtcttcctgaaatacctgcacaggaacagcgtgaacatgccaggaatggtgacgcacatcaaagctcctgaacagcaagtgaaaaatatcttgaatgaactcttccaacgggagaacagggtattgcattactggaccatgaggaagagacggctggaccagtgtcagcagtacgtggtctttgagaggagtgccaagcaggctttggaatggatccatgacaatggcgagttctacctttccacacacacctccacgggctccagtatacagcacacccaggagctcctgaaagagcacgaggagttccagataactgcaaagcaaaccaaagagagagtgaagctattgatacagctggctgatggcttttgtgaaaaagggcatgcccatgcggcagagataaaaaaatgtgttactgctgtggataagaggtacagagatttctctctgcggatggagaagtacaggacctctttggaaaaagccctggggatttcttcagattccaacaaatcgagtaaaagtctccagctagatatcattccagccagtatccctggctcagaggtgaaacttcgagatgctgctcatgaacttaatgaagagaagcggaaatctgcccgcaggaaagagttcataatggctgagctcattcaaactgaaaaggcttatgtaagagacctccgggaatgtatggatacgtacctgtgggaaatgaccagtggcgtggaagagattccacctggcattgtaaacaaagaactcatcatcttcggaaacatgcaagaaatctacgaatttcataataacatattcctaaaggagctggaaaaatatgaacagttgccagaggatgttggacattgttttgttacttgggcagacaagtttcagatgtatgtcacatattgcaaaaataagcctgattctactcagctgatattggaacatgcagggtcctattttgacgagatacagcagcgacatggattagccaattccatttcttcctaccttattaaaccagttcagcgaataacgaagtatcagctccttttaaaagagctgctgacgtgctgtgaggaaggaaagggagagattaaagatggcctggaggtgatgctcagcgtgccgaagcgagccaatgatgccatgcacctcagcatgctggaagggtttgatgaaaacattgagtctcagggagaactcatcctacaggaatccttccaagtgtgggacccaaaaaccttaattcgaaagggtcgagaacggcatctcttcctttttgaaatgtccttagtatttagtaaagaagtgaaagattccagtgggagaagcaagtacctttataaaagcaaattgtttacctcagagttgggtgtcacagaacatgttgaaggagacccttgcaaatttgcactgtgggtggggagaacaccaacttcagataataaaattgtccttaaggcttccagcatagagaacaagcaggactggataaagcatatccgcgaagtcatccaggagcggacgatccacctgaagggagccctgaaggagcccattcacatccctaagaccgctcccgccacaagacagaagggaaggagggatggagaggatctggacagccaaggagacggcagcagccagcctgatacgatttccatcgcctcacggacgtctcagaacacgctggacagcgataagctctctggtggctgtgagctgacagtggtgatccatgacttcaccgcttgcaacagcaacgagctgaccatccgacggggccagaccgtggaagttctggagcggccgcatgacaagcctgactggtgtctggtgcggacaactgaccgctccccagcggcagaaggcctggtcccctgtggttcactgtgcatcgcccactccagaagtagcatggaaatggagggcatcttcaaccacaaagactcgctctccgtctccagcaatgacgccagtccacccgcatccgtggcttccctccagccccacatgatcggggcccagagctcgccgggccccaagcggccgggcaacaccctgcgcaagtggctcaccagccccgtgcggcggctcagcagcggcaaggccgacgggcacgtgaagaagctggcgcacaagcacaagaagagccgcgaggtccgcaagagcgccgacgccggctcgcagaaggactccgacgacagtgcggccaccccgcaggacgagacggtcgaggagagaggccggaacgagggcctgagcagcggtactctctccaaatcctcctcctcggggatgcagagctgtggagaagaggaaggcgaggagggggccgacgccgtgcccctgccgccacccatggccatccagcagcacagcctcctccagccagactcacaggatgacaaggcctcttctcggttattagtccgccccaccagctccgaaacaccgagtgcagccgagctcgtcagtgcaattgaggaactcgtgaaaagcaagatggcactggaggatcgccccagctcactccttgttgaccagggagatagtagcagcccttccttcaacccttcggataattcccttctctcttcctcctcgcccattgatgagatggaagaaaggaaatccagctctttaaagagaagacactacgttttgcaagaactagtggagacagagcgtgactatgtgcgggaccttggctatgtggttgagggctacatggcacttatgaaagaagatggtgttcctgatgacatgaaaggaaaagacaaaattgtgttcggcaacatccatcagatttacgactggcacagagacttttttttaggagagttagagaagtgccttgaagatccagaaaaactaggatccctttttgttaaacacgagagaaggttgcacatgtacatagcttattgtcaaaataaaccaaagtctgagcacattgtctcagaatacattgataccttttttgaggacttaaagcagcgtcttggccacaggttacagctcacagatctgttgatcaaaccagtgcagagaatcatgaagtatcagctgttactgaaggacttcctcaagtattccaaaaaggccagcctggatacatcagaattagagagagctgtggaagtcatgtgcatagtacccaggcggtgcaacgacatgatgaacgtggggcggctgcaaggattcgacgggaaaatcgttgcccagggtaaactgctcttgcaggacacattcttggtcacagaccaagatgcaggacttctgcctcgctgcagagagaggcgcatcttcctctttgagcagatcgtcatattcagcgaaccacttgataaaaagaagggcttctccatgccgggattcctgtttaagaacagtatcaaggtgagttgcctttgcctggaggaaaatgtggaaaatgatccctgtaaatttgctctgacatcgaggacgggtgacgtggtagagaccttcattttgcattcatctagtccaagtgtccggcaaacttggatccatgaaatcaaccaaattttagaaaaccagcgcaattttttaaatgccttgacatcgccaatcgagtaccagaggaaccacagcgggggcggcggcggcggcggcagcgggggcagcggcgggggtgggggcagcggcggcggcggggcccccagtggcggcagcggccacagtggcggccccagcagctgcggcggcgcccccagcacgagcaggagccggccctcccggatcccccagcctgtccgacaccacccccccgtgctggtctcctctgcagcctcgagccaggcagaggcagacaagatgtcaggtacgtccacccccgggccctccctgcctccccctggcgcggcccccgaggccggccccagcgcgcccagcaggcggccccccggcgcggacgccgaggggtccgagcgagaagcggagccgatccccaagatgaaggtgctggagagccccaggaaaggcgccgcgaacgcctcggggtcgagcccagacgcccccgccaaggacgcgcgcgctagcctgggcaccctgccgcttgggaagccccgggccggggccgcttcgccgctgaactcgccgctctccagcgcggtcccttctctcggcaaggagcccttcccccccagcagccccctgcagaaggggggctccttctggagctccatccccgcctcccccgccagccgacccggctccttcaccttcccgggggacagcgactccctccagcggcagacaccccgccacgcggcccctggcaaggatactgaccgcatgagcacgtgctcctcggccagcgagcagtccgtgcagtccacccagagcaacgggagtgaaagcagcagcagtagcaacatctccaccatgttggtgacacacgattacacggcagtgaaggaggatgagatcaacgtctaccaaggagaggtcgttcaaattctggccagcaaccagcagaacatgtttctggtgttccgagccgccactgaccagtgccccgcagctgagggctggattccaggctttgtcctgggccacaccagtgcagtcatcgtggagaacccggacgggactctcaagaagtcaacatcttggcacacagcactccgtttaaggaaaaaatctgagaaaaaagataaagacggcaaaagggaaggcaagttagagaacggttatcggaagtcacgggaaggactcagcaacaaggtatctgtgaagcttctcaatcccaactacatttatgacgttcccccagaattcgtcattccattgagtgaggtcacgtgtgagacaggggagaccgttgttcttagatgtcgagtctgtggccgccccaaagcctcaattacctggaagggccctgaacacaacaccttgaacaacgatggtcactacagcatctcctacagtgacctgggagaggccacgctgaagattgtgggcgtgaccacggaagatgacggcatctacacgtgcatcgctgtcaatgacatgggttcagcctcatcgtcggccagcctgagggtcctaggtccagggatggatgggatcatggtgacctggaaagacaactttgactccttctacagtgaagtggctgagcttggcaggggcagattctctgtcgttaagaaatgtgatcagaaaggaaccaagcgagcagtggccactaagtttgtgaacaagaagttgatgaagcgcgaccaggtcacccatgagcttggcatcctgcagagcctccagcaccccctgcttgtcggcctcctcgacacctttgagacccccaccagctacatcctggtcttagaaatggctgaccagggtcgcctcctggactgcgtggtgcgatggggaagcctcactgaagggaagatcagggcgcacctgggggaggttctggaagctgtccggtacctgcacaactgcaggatagcacacctggacctaaagcctgagaatatcctggtggatgagagtttagccaagccaaccatcaaactggctgactttggagatgctgttcagctcaacacgacctactacatccaccagttactggggaaccctgaattcgcagcccctgaaatcatcctcgggaaccctgtctccctgacctcggatacgtggagtgttggagtgctcacatacgtacttcttagtggcgtgtcccccttcctggatgacagtgtggaagagacctgcctgaacatttgccgcttagactttagcttcccagatgactactttaaaggagtgagccagaaggccaaggagttcgtgtgcttcctcctgcaggaggaccccgccaagcgtccctcggctgcgctggccctccaggagcagtggctgcaggccggcaacggcagaagcacgggcgtcctcgacacgtccagactgacttccttcattgagcggcgcaaacaccagaatgatgttcgacctatccgtagcattaaaaactttctgcagagcaggcttctgcctagagtttgacctatccagaagttctttctcattctctttcacctgccaatcagctgttaatctgaattttcaagagaaaacaagcaaacataactgatcagctgccggtatgttcatcgtgtgaaattgcattccaagtgagctgtgctcagcagtgcttggacacagagctgcaagctgcgctggggtggaggaccgtcacttacactctgcccaaggcagaggtcgcattgctgtatcacagtattttattcaggtttctgcaaaaaaataaaaagataacttttttaaacaaacatgaatagaattttgcaaatttaacgttttcaagatttattcaaggaaacaaaatgcctatgttcaaccactggtgttaatgaacaaagatactgtgcgtctctggggaagacgcacctaggtggcggccactcccatggccttgtctaggactcagagaccactcggctctgagcttccaggcgcctcgtctgtgtgcatctcacgcccgacgtggcttctgaaacgtgcattcaacctcaaacttttgcataaaatagaatgaatcgttttgctctgatgaaatgtaggccttacttgtatataagactgttcctgccttcggtctgtcattttcccacctgcctcccctacccaccccccacccaccacctggggcttcctctgggggtccgagggtcttcccatcacatgaagacatcaggttgggtcctgccccactgcccctccccctgttcctgccccaagccgtcaatcagattgtggagcagtacacagtcagatgaaaatactgtaaatgcactcattgggggttttttggttttacttcatatcatgtgcaatgttgtggctttaacattttatgcaactatttatgaagacctctgttgtacctgtaataaatatatagaaaaagcaaaaaaaaaaaaaaaaaa

SEQ ID NO: 142 - DNA, 3691 bp, Homo sapiens
tggaggcgcgcaggccggctccgctccggccccggacgatgcggcgcgcccaggatgctgccgtgcctcgtagtgctgctggcggcgctcctcagcctccgtcttggctcagacgctcatgggacagagctgcccagccctccgtctgtgtggtttgaagcagaatttttccaccacatcctccactggacacccatcccaaatcagtctgaaagtacctgctatgaagtggcactcctgaggtatggaatagagtcctggaactccatctccaactgtagccagaccctgtcctatgaccttaccgcagtgaccttggacctgtaccacagcaatggctaccgggccagagtgcgggctgtggacggcagccggcactccaactggaccgtcaccaacacccgcttctctgtggatgaagtgactctgacagttggcagtgtgaacctagagatccacaatggcttcatcctcgggaagattcagctacccaggcccaagatggcccccgcaaatgacacatatgaaagcatcttcagtcacttccgagagtatgagattgccattcgcaaggtgccgggaaacttcacgttcacacacaagaaagtaaaacatgaaaacttcagcctcctaacctctggagaagtgggagagttctgtgtccaggtgaaaccatctgtcgcttcccgaagtaacaaggggatgtggtctaaagaggagtgcatctccctcaccaggcagtatttcaccgtgaccaacgtcatcatcttctttgcctttgtcctgctgctctccggagccctcgcctactgcctggccctccagctgtatgtgcggcgccgaaagaagctacccagtgtcctgctcttcaagaagcccagccccttcatcttcatcagccagcgtccctccccagagacccaagacaccatccacccgcttgatgaggaggcctttttgaaggtgtccccagagctgaagaacttggacctgcacggcagcacagacagtggctttggcagcaccaagccatccctgcagactgaagagccccagttcctcctccctgaccctcacccccaggctgacagaacgctgggaaacggggagccccctgtgctgggggacagctgcagtagtggcagcagcaatagcacagacagcgggatctgcctgcaggagcccagcctgagccccagcacagggcccacctgggagcaacaggtggggagcaacagcaggggccaggatgacagtggcattgacttagttcaaaactctgagggccgggctggggacacacagggtggctcggccttgggccaccacagtcccccggagcctgaggtgcctggggaagaagacccagctgctgtggcattccagggttacctgaggcagaccagatgtgctgaagagaaggcaaccaagacaggctgcctggaggaagaatcgcccttgacagatggccttggccccaaattcgggagatgcctggttgatgaggcaggcttgcatccaccagccctggccaagggctatttgaaacaggatcctctagaaatgactctggcttcctcaggggccccaacgggacagtggaaccagcccactgaggaatggtcactcctggccttgagcagctgcagtgacctgggaatatctgactggagctttgcccatgaccttgcccctctaggctgtgtggcagccccaggtggtctcctgggcagctttaactcagacctggtcaccctgcccctcatctctagcctgcagtcaagtgagtgactcgggctgagaggctgcttttgattttagccatgcctgctcctctgcctggaccaggaggagggcccctggggcagaagttaggcacgaggcagtctgggcacttttctgcaagtccactggggctggccccagccaggccctgcagggctggtcagggtgtctggggcaggaggaggccaactcactgaactagtgcagggtatgtgggtggcactgacctgttctgttgactggggccctgcagactctggcagagctgagaagggcagggaccttctccctcctaggaactctttcctgtatcataaaggattatttgctcaggggaaccatggggctttctggagttgtggtgaggccaccaggctgaagtcagctcagacccagacctccctgcttaggccactcgagcatcagagcttccagcaggaggaagggctgtaggaatggaagcttcagggccttgctgctggggtcatttttaggggaaaaaggaggatatgatggtcacatggggaacctcccctcatcgggcctctggggcaggaagcttgtcactggaagatcttaaggtatatattttctggacactcaaacacatcataatggattcactgaggggagacaaagggagccgagaccctggatggggcttccagctcagaacccatccctctggtgggtacctctggcacccatctgcaaatatctccctctctccaacaaatggagtagcatccccctggggcacttgctgaggccaagccactcacatcctcactttgctgccccaccatcttgctgacaacttccagagaagccatggttttttgtattggtcataactcagccctttgggcggcctctgggcttgggcaccagctcatgccagccccagagggtcagggttggaggcctgtgcttgtgtttgctgctaatgtccagctacagacccagaggataagccactgggcactgggctggggtccctgccttgttggtgttcagctgtgtgattttggactagccacttgtcagagggcctcaatctcccatctgtgaaataaggactccacctttaggggaccctccatgtttgctgggtattagccaagctggtcctgggagaatgcagatactgtccgtggactaccaagctggcttgtttcttatgccagaggctaacagatccaatgggagtccatggtgtcatgccaagacagtatcagacacagccccagaagggggcattatgggccctgcctccccataggccatttggactctgccttcaaacaaaggcagttcagtccacaggcatggaagctgtgaggggacaggcctgtgcgtgccatccagagtcatctcagccctgcctttctctggagcattctgaaaacagatattctggcccagggaatccagccatgacccccacccctctgccaaagtactcttaggtgccagtctggtaactgaactccctctggaggcaggcttgagggaggattcctcagggttcccttgaaagctttatttatttattttgttcatttatttattggagaggcagcattgcacagtgaaagaattctggatatctcaggagccccgaaattctagctctgactttgctgtttccagtggtatgaccttggagaagtcacttatcctcttggagcctcagtttcctcatctgcagaataatgactgacttgtctaattcgtagggatgtgaggttctgctgaggaaatgggtatgaatgtgccttgaacacaaagctctgtcaataagtgatacatgttttttattccaataaattgtcaagaccacaaaaaaaaaaaaaaaaaaaaaaaaaaaaaaaaaaaaaaaaaaaaaaaaaaaaaaaaaaaaaaa

SEQ ID NO: 143 - DNA, 2212 bp, Homo sapiens
ggcttctgggtcaaaggaccagtctgcagagggatcctgtggctggaagcgaggaggctccacacggccgttgcagctaccgcagccaggatctgggcatccaggcacggccatgacccctccgaggctcttctgggtgtggctgctggttgcaggaacccaaggcgtgaacgatggtgacatgcggctggccgatgggggcgccaccaaccagggccgcgtggagatcttctacagaggccagtggggcactgtgtgtgacaacctgtgggacctgactgatgccagcgtcgtctgccgggccctgggcttcgagaacgccacccaggctctgggcagagctgccttcgggcaaggatcaggccccatcatgctggatgaggtccagtgcacgggaaccgaggcctcactggccgactgcaagtccctgggctggctgaagagcaactgcaggcacgagagagacgctggtgtggtctgcaccaatgaaaccaggagcacccacaccctggacctctccagggagctctcggaggcccttggccagatctttgacagccagcggggctgcgacctgtccatcagcgtgaatgtgcagggcgaggacgccctgggcttctgtggccacacggtcatcctgactgccaacctggaggcccaggccctgtggaaggagccgggcagcaatgtcaccatgagtgtggatgctgagtgtgtgcccatggtcagggaccttctcaggtacttctactcccgaaggattgacatcaccctgtcgtcagtcaagtgcttccacaagctggcctctgcctatggggccaggcagctgcagggctactgcgcaagcctctttgccatcctcctcccccaggacccctcgttccagatgcccctggacctgtatgcctatgcagtggccacaggggacgccctgctggagaagctctgcctacagttcctggcctggaacttcgaggccttgacgcaggccgaggcctggcccagtgtccccacagacctgctccaactgctgctgcccaggagcgacctggcggtgcccagcgagctggccctactgaaggccgtggacacctggagctggggggagcgtgcctcccatgaggaggtggagggcttggtggagaagatccgcttccccatgatgctccctgaggagctctttgagctgcagttcaacctgtccctgtactggagccacgaggccctgttccagaagaagactctgcaggccctggaattccacactgtgcccttccagttgctggcccggtacaaaggcctgaacctcaccgaggatacctacaagccccggatttacacctcgcccacctggagtgcctttgtgacagacagttcctggagtgcacggaagtcacaactggtctatcagtccagacgggggcctttggtcaaatattcttctgattacttccaagccccctctgactacagatactacccctaccagtccttccagactccacaacaccccagcttcctcttccaggacaagagggtgtcctggtccctggtctacctccccaccatccagagctgctggaactacggcttctcctgctcctcggacgagctccctgtcctgggcctcaccaagtctggcggctcagatcgcaccattgcctacgaaaacaaagccctgatgctctgcgaagggctcttcgtggcagacgtcaccgatttcgagggctggaaggctgcgattcccagtgccctggacaccaacagctcgaagagcacctcctccttcccctgcccggcagggcacttcaacggcttccgcacggtcatccgccccttctacctgaccaactcctcaggtgtggactagacggcgtggcccaagggtggtgagaaccggagaaccccaggacgccctcactgcaggctcccctcctcggcttccttcctctctgcaatgaccttcaacaaccggccaccagatgtcgccctactcacctgagcgctcagcttcaagaaattactggaaggcttccactagggtccaccaggagttctcccaccacctcaccagtttccaggtggtaagcaccaggacgccctcgaggttgctctgggatccccccacagcccctggtcagtctgcccttgtcactggtctgaggtcattaaaattacattgaggttcctaaaaaaaaaaaaaaaaaaaaaa

SEQ ID NO: 144 - DNA, 6344 bp, Homo sapiens
gcggaagtgtgggagggtctgcggggcgggctcaggaggtccgcgggaggatggagcagtgagcgggtctgggcggctgctggcagcgccatggagacggtacagctgaggaacccgccgcgccggcagctgaaaaagttggatgaagatagtttaaccaaacaaccagaagaagtatttgatgtcttagagaaacttggagaagggtcctatggcagcgtatacaaagctattcataaagagaccggccagattgttgctattaagcaagttcctgtggaatcagacctccaggagataatcaaagaaatctctataatgcagcaatgtgacagccctcatgtagtcaaatattatggcagttattttaagaacacagacttatggatcgttatggagtactgtggggctggttctgtatctgatatcattcgattacgaaataaaacgttaacagaagatgaaatagctacaatattacaatcaactcttaagggacttgaataccttcattttatgagaaaaatacaccgagatatcaaggcaggaaatattttgctaaatacagaaggacatgcaaaacttgcagattttggggtagcaggtcaacttacagataccatggccaagcggaatacagtgataggaacaccattttggatggctccagaagtgattcaggaaattggatacaactgtgtagcagacatctggtccctgggaataactgccatagaaatggctgaaggaaagcccccttatgctgatatccatccaatgagggcaatcttcatgattcctacaaatcctcctcccacattccgaaaaccagagctatggtcagataactttacagattttgtgaaacagtgtcttgtaaagagccctgagcagagggccacagccactcagctcctgcagcacccatttgtcaggagtgccaaaggagtgtcaatactgcgagacttaattaatgaagccatggatgtgaaactgaaacgccaggaatcccagcagcgggaagtggaccaggacgatgaagaaaactcagaagaggatgaaatggattctggcacgatggttcgagcagtgggtgatgagatgggcactgtccgagtagccagcaccatgactgatggagccaatactatgattgagcacgatgacacgttgccatcacaactgggcaccatggtgatcaatgcagaggatgaggaagaggaaggaactatgaaaagaagggatgagaccatgcagcctgcgaaaccatcctttcttgaatattttgaacaaaaagaaaaggaaaaccagatcaacagctttggcaagagtgtacctggtccactgaaaaattcttcagattggaaaataccacaggatggagactacgagtttcttaagagttggacagtggaggaccttcagaagaggctcttggccctggaccccatgatggagcaggagattgaagagatccggcagaagtaccagtccaagcggcagcccatcctggatgccatagaggctaagaagagacggcaacaaaacttctgagcaaggccaggctgtgagggccccagctccacccaggctttgggtgaattctggatggcttgcctcatgtttgttagccagcacttctgctctgtcgtctctccacagcacctttgtgaactcaggaatgtgcgccagtgggaagggctctcttgacagtcagcgtgccatcttgatgtgtgtatgtacattggtcaggtatattatctcaaaggatttatattggcgcttttaactcagagttttaaaccccaggaacagagactcctagttgagtgatagctgggaaagttttacattgtctgtttttcttctcccaatagctttcaattgttctttctggaagacttttaaaaaaatataaatatgcatatatatatataaattataaatagattccccacgcagtgtggtggcatctctgtacaggtacagttttaaacggtttgcctcttttctgtaagattatggtactgtggaacatgagggcagaggacaccgggaggctgttagggggtcactgaatcccaggagccaacctccccctttgcagggctgcatttaaaaattaggtttgggacagttcttgtaccgtggtttcagccttgtgtggtcatcactggcttctggagctattggtgatgtccaagggaaagctttgagagtttatgtttactctttgagtcccaggagaagcctggcaccctctttgcaaattggcctttgctctttcaatgcctttcatccatctccactctctcaactgcctaaagtcacagcacagatactgcccagtgccttaagaggagacatgatctctaccagggactctcagcaaacacgggactgtgttcagtccacaaaggaaaagcgtttttgaagctctcattgttcatgtaaaaatcatacacgtggcatgttgctccacattccttacacacaggggtagaggggattgcttttgtgacccacgttcaaatatgtgactgttttcttttctcttttactgctaagcagcctggaaaggataaatgaatattagactaagatttgttttccaggaggctcaatctgaacacacagaatgtcagagctggaagggactatagagatcatctgatctgatcctcttgtacggatgatcgcaaaactgaggtgtagagaggggaatggccaaaatcacaaagcaagttagcgttaagagctgagactagaattcagggtcctcactcccaggccaccgaaccatgcagccccttctttgggggaagagacctgtgtcagtcttggttaattgttccagggaaccttgctaacagaaacttgctcttgccttggctcttcagtagatgacctggctgtaaagagattccctggacgagccagatcattcagtttcagcgagtccttgagctccacaacatctaccagatatagcagacaagcacccatggaggcaggtttcgggcctgaagcagatcagagggctttgcaaaagacagcatagagccatcttcctgcaactttacctctttccctcagatggggagccatgactgggttgcacctcaggatactgtaatttgactccataattgcttttgctcctgaaacctgggaatcaatggaaaggcagggaatgtgcctcttctgtggccagattctgttatttgcaattaaagcaagtttttaaaaaatgcaagaggcagttgttagtcttcagggcttggcaactgaaatagctatgtggcggatacggaaaacagaggacaatttgaggatcttgctggaataataaatgacagctaccatttgttgagcacctattatatatcaggcactgagctgggtaggctctaaacttcacaataaccctgtgacttaactactttatctccattttgtagttgaagaaataagttcagagagaaagattccttcccaaggtcatgcagctagtaaatgatagaatcaggattcatagcatcactatagggggtcaatatttacacaaaaaaggaaagtcacaagcctgtttaaaatgaagtgaccaccttttcttgcatagactaaataactcgaactggcatttttaggttggaaagacagctgaattagtagttaagtctgatagccaagtaagttttaaaaaccaaagcatccaggatgcacacccctgcaccatttgctgtgcgaattaatagttctgtctctctctctctttcttttttctttttattctttgagatggattttcgctcttgtcgcccaggctggagtacaatggcacgatcttggctcactgcaacctccgcctcccgggttcaagcgattcttctgctgggattacagcatatgccaccatgcccagattatttttttgtatttgtagtagagacggggtttcaccatgtcagtcaggctggtcttgaactcctgacctcaggtgatccacccgcctcagcctcccacactgctgggattacaggcatgagccaccgctcctggcctctctttcttttttaaacaaagaactttgcacttggccagagaggaggagaaagcccattttctcccttcctaagctagatccaaataaaagaaagttcagttttcccccataactattcttgggtcatgaactttgatctggagtttgttttgtttcaggaatgtgtgcacccagcttgctgatccaacaaagtctattgcttaccagtctagcttgatgaagccttttggccagaagtcaatttgttttggatcagagaaatttcctgacaaggtatatttgttttctagtgacagaaaggcaaaggaacaagtcctagttgttgttgttgttgttgaatactaaatttaagatatgtcagcttgctttcaatgagccttgggcttctgttattgcttgagcatttggaactcgagcttccagagaaatttgaggtcctcgcttgttctctgccttcaagaaacaatgacctgattctgtctttaaaaaaaaaaatctcagaattctttttttgtttgtgtttttttttttttttgagacagagtctcactctgttgcccaggctggagtgcagtggcgccatctcggctcactgcaacctccgcctcccaggttcaagcaattctcctgcctcagcctcccaggtagctgccactacaggtgctgcaccaccacgcccggctaatttttgtatttttagtagagacagggtttcaccatattagccaggtgggtcttgaactcctgaccttgtgatccacccgcctcggcctcccaaagtgctgggattacaggcgtgagccaccttgcctggccaaaaatctcagaattctttaagactgttttaattgctccatcagtaattttgaagcactttcctttttttttttttttcccctttttgtccctttccccaagccaccaattggatggatgaatgtttgacggggaagaggaagggtaggaggatgcatggatgagtggatgagtggatcgatggatgtattgataaatagatagaaccagtcatctgaagcaacttaagaattgtagccttgactccttgagactgtagatttcgatccaggaaacatttatttagcacctgccagatgccagaaatttataccatttaaaactcagtaagtcttttaaatatcaggaaggagagaagcgacatcatgatacatcctatgggtattaaaaagccaatagaatattatgaataattttatgctaataaatttaacaacttcaacatcataaacaaattccttgaaaaataaaaagtaccaaaattcattcaagaagaaatagataccagcctgagcaacatggcaaaatcccatctctacaaaacatcaaaaaaaaaaaaaattagtcgggcatggtggtgcacacctgtaatcccagcttgtcaggaggctgaagtgggaggatcacctgagcccagggaggtcaaggatgcagtgagccatggtctcaccactgcactctagcctgggtgacagaatgagaccccgtctcaaaaaaaaagaagaagtagataatctgaatagccctatatctatagaaacttaatagtgctgggagatataggtattattatcctcattttacagatgtgaaaattgaggctcagagaagtaaagtctattgctcaaggtcatgtggctagaatatggcagagccatgattcagatccaggtcttctgattcttattccagtgtcctttctagcataccatgttgcctctaaagattgcagctccttatttactagaaaattgttcctgcccaatctacatctccacctcaccccatcttttcttaagcactatgtttgtgtttttatcagtattatattcattgtctttggaatacatgttcttgtttgtgtttggaaaaaaaatctcttttaccagcttgcactcggaccaacttggaaaaaaaaaagcttaaatgtttttgctatgtacagtttaaaaatgtgaagtttgtagctttaactttttgtaagaaaatctaataacactggcttaagtgctgacttgaaatgctattttgtaaggtttggatgtaagtaatcaattgaggtcagcagtttgtatgagacatagcttcctccattgcccccactccttttttcttttttaagtttgagatgcttcctgtgtttttatgttagaattgttgttctccttcttttcttcttcctatacctcatcacgtttgttttaaataaactgtcctttggaccacaaaaaaaaaaaaaaaa

SEQ ID NO: 145 - DNA, 4922 bp, Homo sapiens
cgtcgccgcagcagccaccaattcgccagcggttcaggtggctcttgcctcgatgtcctagcctaggggcccccgggccggacttggctgggctcccttcaccctctgcggagtcatgagggcgaacgacgctctgcaggtgctgggcttgcttttcagcctggcccggggctccgaggtgggcaactctcaggcagtgtgtcctgggactctgaatggcctgagtgtgaccggcgatgctgagaaccaataccagacactgtacaagctctacgagaggtgtgaggtggtgatggggaaccttgagattgtgctcacgggacacaatgccgacctctccttcctgcagtggattcgagaagtgacaggctatgtcctcgtggccatgaatgaattctctactctaccattgcccaacctccgcgtggtgcgagggacccaggtctacgatgggaagtttgccatcttcgtcatgttgaactataacaccaactccagccacgctctgcgccagctccgcttgactcagctcaccgagattctgtcagggggtgtttatattgagaagaacgataagctttgtcacatggacacaattgactggagggacatcgtgagggaccgagatgctgagatagtggtgaaggacaatggcagaagctgtcccccctgtcatgaggtttgcaaggggcgatgctggggtcctggatcagaagactgccagacattgaccaagaccatctgtgctcctcagtgtaatggtcactgctttgggcccaaccccaaccagtgctgccatgatgagtgtgccgggggctgctcaggccctcaggacacagactgctttgcctgccggcacttcaatgacagtggagcctgtgtacctcgctgtccacagcctcttgtctacaacaagctaactttccagctggaacccaatccccacaccaagtatcagtatggaggagtttgtgtagccagctgtccccataactttgtggtggatcaaacatcctgtgtcagggcctgtcctcctgacaagatggaagtagataaaaatgggctcaagatgtgtgagccttgtgggggactatgtcccaaagcctgtgagggaacaggctctgggagccgcttccagactgtggactcgagcaacattgatggatttgtgaactgcaccaagatcctgggcaacctggactttctgatcaccggcctcaatggagacccctggcacaagatccctgccctggacccagagaagctcaatgtcttccggacagtacgggagatcacaggttacctgaacatccagtcctggccgccccacatgcacaacttcagtgttttttccaatttgacaaccattggaggcagaagcctctacaaccggggcttctcattgttgatcatgaagaacttgaatgtcacatctctgggcttccgatccctgaaggaaattagtgctgggcgtatctatataagtgccaataggcagctctgctaccaccactctttgaactggaccaaggtgcttcgggggcctacggaagagcgactagacatcaagcataatcggccgcgcagagactgcgtggcagagggcaaagtgtgtgacccactgtgctcctctgggggatgctggggcccaggccctggtcagtgcttgtcctgtcgaaattatagccgaggaggtgtctgtgtgacccactgcaactttctgaatggggagcctcgagaatttgcccatgaggccgaatgcttctcctgccacccggaatgccaacccatggagggcactgccacatgcaatggctcgggctctgatacttgtgctcaatgtgcccattttcgagatgggccccactgtgtgagcagctgcccccatggagtcctaggtgccaagggcccaatctacaagtacccagatgttcagaatgaatgtcggccctgccatgagaactgcacccaggggtgtaaaggaccagagcttcaagactgtttaggacaaacactggtgctgatcggcaaaacccatctgacaatggctttgacagtgatagcaggattggtagtgattttcatgatgctgggcggcacttttctctactggcgtgggcgccggattcagaataaaagggctatgaggcgatacttggaacggggtgagagcatagagcctctggaccccagtgagaaggctaacaaagtcttggccagaatcttcaaagagacagagctaaggaagcttaaagtgcttggctcgggtgtctttggaactgtgcacaaaggagtgtggatccctgagggtgaatcaatcaagattccagtctgcattaaagtcattgaggacaagagtggacggcagagttttcaagctgtgacagatcatatgctggccattggcagcctggaccatgcccacattgtaaggctgctgggactatgcccagggtcatctctgcagcttgtcactcaatatttgcctctgggttctctgctggatcatgtgagacaacaccggggggcactggggccacagctgctgctcaactggggagtacaaattgccaagggaatgtactaccttgaggaacatggtatggtgcatagaaacctggctgcccgaaacgtgctactcaagtcacccagtcaggttcaggtggcagattttggtgtggctgacctgctgcctcctgatgataagcagctgctatacagtgaggccaagactccaattaagtggatggcccttgagagtatccactttgggaaatacacacaccagagtgatgtctggagctatggtgtgacagtttgggagttgatgaccttcggggcagagccctatgcagggctacgattggctgaagtaccagacctgctagagaagggggagcggttggcacagccccagatctgcacaattgatgtctacatggtgatggtcaagtgttggatgattgatgagaacattcgcccaacctttaaagaactagccaatgagttcaccaggatggcccgagacccaccacggtatctggtcataaagagagagagtgggcctggaatagcccctgggccagagccccatggtctgacaaacaagaagctagaggaagtagagctggagccagaactagacctagacctagacttggaagcagaggaggacaacctggcaaccaccacactgggctccgccctcagcctaccagttggaacacttaatcggccacgtgggagccagagccttttaagtccatcatctggatacatgcccatgaaccagggtaatcttggggagtcttgccaggagtctgcagtttctgggagcagtgaacggtgcccccgtccagtctctctacacccaatgccacggggatgcctggcatcagagtcatcagaggggcatgtaacaggctctgaggctgagctccaggagaaagtgtcaatgtgtaggagccggagcaggagccggagcccacggccacgcggagatagcgcctaccattcccagcgccacagtctgctgactcctgttaccccactctccccacccgggttagaggaagaggatgtcaacggttatgtcatgccagatacacacctcaaaggtactccctcctcccgggaaggcaccctttcttcagtgggtctcagttctgtcctgggtactgaagaagaagatgaagatgaggagtatgaatacatgaaccggaggagaaggcacagtccacctcatccccctaggccaagttcccttgaggagctgggttatgagtacatggatgtggggtcagacctcagtgcctctctgggcagcacacagagttgcccactccaccctgtacccatcatgcccactgcaggcacaactccagatgaagactatgaatatatgaatcggcaacgagatggaggtggtcctgggggtgattatgcagccatgggggcctgcccagcatctgagcaagggtatgaagagatgagagcttttcaggggcctggacatcaggccccccatgtccattatgcccgcctaaaaactctacgtagcttagaggctacagactctgcctttgataaccctgattactggcatagcaggcttttccccaaggctaatgcccagagaacgtaactcctgctccctgtggcactcagggagcatttaatggcagctagtgcctttagagggtaccgtcttctccctattccctctctctcccaggtcccagccccttttccccagtcccagacaattccattcaatctttggaggcttttaaacattttgacacaaaattcttatggtatgtagccagctgtgcactttcttctctttcccaaccccaggaaaggttttccttattttgtgtgctttcccagtcccattcctcagcttcttcacaggcactcctggagatatgaaggattactctccatatcccttcctctcaggctcttgactacttggaactaggctcttatgtgtgcctttgtttcccatcagactgtcaagaagaggaaagggaggaaacctagcagaggaaagtgtaattttggtttatgactcttaaccccctagaaagacagaagcttaaaatctgtgaagaaagaggttaggagtagatattgattactatcataattcagcacttaactatgagccaggcatcatactaaacttcacctacattatctcacttagtcctttatcatccttaaaacaattctgtgacatacatattatctcattttacacaaagggaagtcgggcatggtggctcatgcctgtaatctcagcactttgggaggctgaggcagaaggattacctgaggcaaggagtttgagaccagcttagccaacatagtaagacccccatctctttaaaaaaaaaaaaaaaaaaaaaaaaaaa

SEQ ID NO: 146 - DNA, 2906 bp, Homo sapiens
aagaagcgacgtgtcccactgtcctggctccgtgggtccagtgagattgggcctgggcgctggagctgctgtggctcccgccgcggcggctgccatggaggccatgccagagcccagaactcacgccgggggaggccgagacagccggcggtactcatagatgaggcagcggcggcggcggcggcggcggcagcccgggctctccatgagcaggcggcggcggcgacgggtgcggcggcaccggcagttttcggtccccagggaggatgaagacactgtttgaagagatcaaagcatcaattaaaaataactataaccaagatcgatcattttgtaggcctgttcttccttgggggggtgtttttactatcaaagctggccgcaaagcagtatcctgtacaccactctatgttgaaataagactgaaaaatacctgcaccatagatggattcttgatgttattatatgtcattcttaatgaaaatgaaaacttccctagggaactctctcttcattttggtagagagtttgtagactgttttctttacttaatggacacctacagttttacaactgtgaagctactttggatttgggacaagatggaaaaacagcaatacaaatctgaagtccataaagcttcattaataattgatttgtttgggaatgagcatgataattttacaaaaaatcttgaaaatctcatgtctaccattcaagagagttactgttccaactggcgatgcccaactcgagtgcaggaggatcagcagcgcacaattaatataaatcctccccaagaaattccacatggaaacttgataagactggctgtgaatgagttattctgttccaagattgaactgtgtgaagagcatgggtgtggtggcttaagagaattttcccaacgaattttctgccatggggcacccccttttgttgtcttaaatatgcaacattggaaatctgaagatctggcgtatgtaccctattacttggatttgtctgatcacaagtatttgttggaaggtgccacattatttaacaaagaggaacatcattattctgcagctttccagattggtggacattggatgcactatgatgggctcagaaatgtgaatttaattttgttaaataaacccccagagtttctcctcttgtcatcattggtttatattcgagcaacagagaaataaatatagattgatgctaaaagttgttttccctcctgcccatgctctcccagatgaagggcttttattttgtgtatacttggtatccaagaaaatagttcaactatactagtttcagaagtgtattttcagtgtttaaccccaggtaaatgttttatatagaggatctgtgcaaaaatgtttgtaatttttttatatttcctgagttatttttatatgagcatattttatgttggaataaaatatatcttgtggcctttgtattttttatttatatgtacctcaaagatttttacaattctgtctttgaattcaagaaatactttgtcatctgaattctaaatttttctttttggatattcgagtaaaacctaggtaaaagtattttaagtttatataatttaacagttcaaaatatatctgactgtatttctttgccctacctcactataatccaaagtgcactatttgatctagtatggatttgaatgtacaatttatcgatggcttagtttattagttcgatttgcctagtatccctgcagcaattttttaaaatgtctgagaaatttttcagagcttaaactatttctttataatggcaaattacttttaactacttcctaaagtattataaacctgccagtggattttaagtgatagctaagcttccaagcttaattcacgttattacaaataaattatataactatcttaaatgtttatcttataattaaatgtaatttgaaatgctctaatgtattttgcagataaaacaactataaacaatattaggcaactggatgtttactagtgtcggactagcaatagaaatgcactttaaatatatatttaaggggaaatgcgtgcctggaaatacttcttttcctagtgaagttttatattgacacagagaaaagaatacttaaaattttgagtgatgtctactggcttccttgtaagtagtgattgatagcatgcggctttgacttgcaatacaaatcattacgattttatagttatcagaacattacgtttctttataaagaccctaaggtcactcttctttttgcaacttaagggaaaaaatattctcaagggaaaatactttttgaaatttatcaccattttagtgtttacatttcaataaatagttcacttcaggtttgggattgagattagttgcaatatatttagaagctcctacatgacagcacagatcactgccatctgctgaactgctaaagtgcttggtgccatgttgagaaaacttacccaagaatggataaatatgggtgaaacattactgagaatgcctcacgttagcaaatactatgaaaattcttgtttatatatcaaactgatttattttacaaaaaaaaaaaattcaccccaagatttatttagtttcccaagtgtatctgattaggatttaatttagagtaaacttttctggggacacctgattgcatgaactgaagtatacaataacacaaatattacagtaaacataaatggtgtcattaacaaaattattcctaatgcagatttattctttcaggaaatgcactttatttggaatactagtttatcatgaaacaatgacttacctacctcacagggttgttgtgaggattaagatgtttgttaaaatcttgactaccttgaacatgctaataaaaaaacatttttctacctcttttatttgca

SEQ ID NO: 147 - DNA, 6741 bp, Homo sapiens
gccctgcgcccggggcgcctcggagaactgacctgaagtttcagtgtagtcagagagctcttcaagtaataaatcatggagaccagtcaggaaacttccctcttcttggtgaagatcttggaggaactggacagcaagcaaaataccgtttcttatcaggacctgtgcaaatctctctgtgcccggttcgacctgtcgcagcttgccaaactgagaagtgtgctcttctacacagcttgtctcgatcccaattttccagccacgctattcaaagacaagatgaaatgcactgtgaataaccagcaatcaaagaaaatcatggtggcagcagatattgtgacgatattcaacctgatccaaatgaatggcggggctgccaaggagaagctgcccacgggccgccagaaggtacgcaagaaggaggcatcctttgaatcatgtaggtcggacacagagatctgcaatgcagctgagtgtgagcccctgaactgtgagctgagtgagaggtctttcagccggggctaccccatcaggcagtcgtccaagtgccggaagatggactgcaaggactgcccacagtttgtccctgcctctgagcctaacttcctgttgggagttagcaaagaggtgaaaaaccgcgccgcttccctggacaggttgcaggccctggctccgtactctgtgaccagccctcagccctgtgagatgcagaggacctacttccccatgaacatcgaaaacgagtccatttcagaccaggactccctgcccatcaatcagagcatcaaggagaccttcatttccaatgaggagccatttgtggtccagtcctgtgtccagaaaaggaatatcttcaaagaggattttcacaatttgatggcagtgtcccccagtttggttggccccatcagcaaagcagagaatgagcacagggaaccccagagtcgaaaggaaccccacaagccacccttcttcaaccacagctttgaaatgccctataacagccagtacctgaatccagtgtattccccggttcctgacaaaaggcgagcaaagcacgaaagcttagatgaccttcaagcctctacatattttgggcccactcccgtgatgggaacccaagaagccaggcgctgtctagggaagcccaacaagcagactccctggccagccaaaagctggagcctaaacacagaggaagttcctgactttgaacggtcctttttcaatagaaatccctccgaggagaagctacactatccaaatgccagtagccagacccccaatttcccagccccagaaaggcgcccaacttaccttgtgccaaaggatcaacagccaattctccccattgcttatgcggcaaaacaaaatgggctcaaatctaaagagatctcatcccctgttgacctggagaagcatgaaccagtcaaaaagtttaaagacaagagcattaactgcaccagtgggcagctcagctcagacaccagtagcgtgggcacccagactgagcacgtgctggagcccaagaaatgcagagacctgtgcacctctggtcagggcaagtacagtgacaggcacaccatgaagcactcagacgatgactcagaaattgtcagcgacgacatcagtgacattttccgatttcttgatgacatgagcatcagtggctccacgggagtgatacagtcgtcctgctacaacagcacaggatccttgtctcagctccataagtcagactgcgacagttcccctgagcacaacttaaccaaaattgccaatggggtccccaacagcaagggagacaagggcaaccggcctgaaaacacccaccactcggaagaagagctgaagaccagtgtgtgcaaactggtgctcaggattggcgaaatcgaacggaagctggaatccctgtcgggtgtccgtgatgaaatctcccaggtcttgggcaaactaaataaattggaccagaaaatgcaacagcctgagaaggtgagtgtgcagatagatctgaactccttgacaagcgagggtccgtctgatgacagtgcctctccccggatgttccacgcacacagtggctcccacggacccaaactagagaacaaccctgactggtgctgctctgatgctagcgggagcaacagtgaaagcctgcgggtcaaggccttaaaaaaaagcctcttcaccaggccatcctctaggtccctaacagaggagaacagtgccacagagtccaaaattgccagcatctccaactcgcccagagactggcgcaccatcacttataccaaccgtgtgggcctcaatgaggaggagataaaagacacaggcccaggagataataaagactggcatcggaaatctaaagaggcagacaggcagtacgacattcccccacagcaccgactgcccaagcagcccaaagatggcttcctggtggagcaggtgttcagccctcacccctaccctgcctccctcaaggcccacatgaagagcaaccccctgtacacagacatgcggctgaccgagttggccgaggtgaagcggggccaaccttcttggaccattgaggagtatgcacggaatgcgggcgacaagggcaagctgacagccctggacctgcagacgcaagaatctttaaacccaaataatttagagtactggatggaagacatttatactccaggatacgattcattactaaaacgtaaagaagccgaattcagacgagccaaggtctgcaagatagctgctctgatcgctgctgcggcatgcaccgtcatcctcgttattgtcgtgcccatctgcacaatgaaatcatgagctaagaatgcaaccttacgtacagcttatgactaccaatgtcgtcgtctgtatcttagaatcttgcagcagtgaggcaacaatttgttgaaatggagatgaaatcatggaggcatttctacaaatgttgaatgaaggtggttttcagaaagtatacattctagtgagaaatctacctacctattagctttgactcaattacactctgacgcatttttagaagtgcaatatcttttcctaccaaaagaacatcatggactatcaataaatacaaattgaatattccaagccaaaaaaggaagattaattgggttctttccattttgatgatgtttcatggtggggaataagttatacagaagatatttaatacacgcctctttagaagaaactaagggaaatagcaacataagaagaaaagaggtggcttctcttttccataatgttcttagaccattgctggtgaagtaacagggtgtgtgtccctaaagggtattacttctctgtcgacttttatcaagggctactgacgtttcattcttgcccttttgtcatcaacacgacagagtgtctgcatcactgcagatcttcatggaaacattctggaccttcttccttgcacttggagtgagaaggagctggactaccaagtcaggcgtggaatgaagtatgctcagactgcatgatgggccaaggtattcaggccaggagacctcgtcctcaatccaaagtgtaggggagctgcctgctaacgatgtaaggtcagtatttgaaaatcatggccactccaaaggatctcctgttcttgctttggtgtgtggctccattccttgattttctatctcctggtggtaccagatgctctgcctctcatacatgagttgaagagtttggaacttgtccttgtgccttgaagagtagagacaatggctaaacgttgacattctatctgtaaaccatggttttcacgcaccactaatatctgccattttcaatggctttaaaaagattttgaaagcttgctcaataatgttcaataatataataataataaaggcactgaggtcttctcagttaccccaacacctactccagagttttgaatacttgtcagcagtgcaaaaaatattatctgtttaaccacttatctatatgtctatctatctatctatatgtctatctatctatctaaatacttgatttttatttattgtcttctctgttaaataacttgagagcaaggtttctttcgtgtaaaagaagctgttgtaatttcatccaaatttgatctgtttccacctgctgaatggtgctctgacaataatggaacagaaagaatccttatcagcatctgattccaatgtcttgttacaggtcaaagaaaaaaggattgacagaaactagctaccttatatatattttttgataataaggtgggatataaatagattttggtagcaagtgtaatcactccgtatgatataataaatttctaaaagatttgagagcatctcaatttttaaagcaataggagtctagcatccattctgaaaaatcgcaaataatgcttagcttgctgtgtctgattctgttgttcaccattaaggggtagacagttaattttattatgttaacaagtgagggatgaatgttttcatctgtggtgaacctttatttttagaagtcttcatgttatctatttgtattatcatgtttatgtatggattttcaatttcagtaaccgaaaacttaagccttagtatgaaaaactgaggatttataattgaaaatgaaaaaaatatgttactctctatcatcagaattatagtctttggtgctctgttttcaatggggcatattacataaggttgtttctttcaccccaaagagactactaggttaccactctgggcattgcctttccacctaacccctcaaccagtaagactctacaccatattgtagccccactattctcctctttatcacagatgaagtgccagagcatcagagataggtagctcccaacctcttgctctggatttgcagaagagggggagatgtacttacccaggataagaaaaatctagtcaaatccaccccaaatcttccatttaacaggtaggaccatcgaggctggaccaaaccactttttccactgcccttggtgaatctattcctagtggaccccatttgggcatgtgcctagctaccttgggaaggcatgactataagtcacacctcaggcttggaaatgaaaggattctatagaatattctatactttccatagctggagaggtagtcagaaattcagtcttgctctgagtccacagtagctttaaaattcaactcaacattgttgtcacgtaacggaaacatctagacctggtaataatccaggaaattgcaaaatggaggccaaaagtaaggtgggtttctctggaaaggggtcatcctcagtctgataataccaagtctgacgctgaggttatgaatcattaccatggcttggagctattggatgcttggggtcttgggatagatagaaggtgaggttcacagttggagcttttcttgccattgaccccaagctcaccccagccttccttccctgaccctgagactcaccctatctatctcccctattccctcagtttgcagaatgagcaagatagagtctggctaggagggaaacatctatccatctctctaatctttgcccatcacctcctgttgcaatgagttcccgcaggtgacatacggactggcctctctactgtactgggtgccatctcccaccatactctggcatttttatgtaaaggataatttcttgtacctgagtctaaaattacaacgttatcaaaattcacttcgtttttcctgcattttaaaagtaataaaatattatttgagattattttgaaattaaatatccttaaccaatgattaaattcataatcatttcatcttctttcataatcatttcatcttctaatctgaatttgttttgaacacagccttgcagaaaagcaaaaaatatttccccgctcaaattttgccgacattttataccagtatccccttcattacagtaaactaaatcataacttacatcatccattactagctgatcataaattgttagtattttaaggtatgcaactatgtgattgacatctgtaaggctagtttaatagacgtgctaaatatcactgttctgaatatctgtgccatagttctgatacccttattggaatcaaggcagtgctgtttctgtttacaagttatcaagataagagcagtggcatcacatttgttgttgttgtttttttttttgaaatagaaaaaaacagaagaagctctgccaacaataaaagattttgttaagtggtataaaaattgtgaatgttgaaattcaacatgcttcatattataaccaacctgcaagaatattgtggtcaattgtgtgaataccaaatcagtatatactgtatactgtactatgaaaatttgtatttaaaggcaaagatacaagtaattgttggtataattggggaaaagggtattcaatatttattaagtaacaatgagaaatgcaacaaacttccttatttatgccttatgaataaaagagtgtggaatgtaaggtgaaattttatgtgcaagatcctgaaggaatgggtattcttgaaggcagggactgtcttttctatgtttgttctgtacagctctcagcacactcttggtgcttgataaatgttatgttatataataccaataactaagcacatttttagatcttttttcaaatggcttgtgtaaaatttggttaatgtacaatggttggtttgaagctatcatgtaaaattggcctctccaaatataatcagaaataaaccgaaaaaaatat

SEQ ID NO: 148 - DNA, 1392 bp, Homo sapiens
tgcagactgatatggattcaccactgctaacacctcctggttggaactacaggaatagaactggaaagggaaaaaaggcagcattcaccacatcccaatcctgaatccaagagtctaagatagtcccccactcctatctcaggcttagaggattagattaatctcctggagggaagactcttccttgaaacatttttttttatctgcctgtagctattgggataattcgggaaatccacagggacagttcaagtcatctttgtcctctactttctgttgcactctcagccttgttctctttttagaaactgcatggtaactattatatagctaaagaagagcattctgacctctgccctgggacttcctggatcctcctcttcttataaatacaagggcagagctggtatcccggggagccaggaagcagtgagcccaggagtcctcggccagccctgcctgcccaccaggaggatgaaggtctccgtggctgccctctcctgcctcatgcttgttgctgtccttggatcccaggcccagttcataaatgatgcagagacagagttaatgatgtcaaagcttccactggaaaatccagtagttctgaacagctttcactttgctgctgactgctgcacctcctacatctcacaaagcatcccgtgttcactcatgaaaagttattttgaaacgagcagcgagtgctccaagccaggtgtcatattcctcaccaagaaggggcggcaagtctgtgccaaacccagtggtccgggagttcaggattgcatgaaaaagctgaagccctactcaatataataataaagagacaaaagaggccagccacccacctccaacacctcctgagcctctgaagctcccaccaggccagctctcctcccacaacagcttcccacagcatgaagatctccgtggctgccattcccttcttcctcctcatcaccatcgccctagggaccaagactgaatcctcctcacaaactggggggaaaccgaaggttgttaaaatacagctaaagttggtggggggaccttaccacccctcagagtgctgcttcacctacactacctacaagatcccgcgtcagcggattatggattactatgagaccaacagccagtgctccaagcccggaattgtcttcatcaccaaaaggggccattccgtctgtaccaaccccagtgacaagtgggtccaggactatatcaaggacatgaaggagaactgagtgacccagaaggggtggcgaaggcacagctcagagacataaagagaagatgccaaggccccctcctccacccaccgctaactctcagccccagtcaccctcttggagcttccctgctttgaattaaagaccactcatgctcttc

SEQ ID NO: 149 - DNA, 878 bp, Homo sapiens
tctgcctccactgctctgtgctgggatcatggaacttgcactgctgtgtgggctggtggtgatggctggtgtgattccaatccagggcgggatcctgaacctgaacaagatggtcaagcaagtgactgggaaaatgcccatcctctcctactggccctacggctgtcactgcggactaggtggcagaggccaacccaaagatgccacggactggtgctgccagacccatgactgctgctatgaccacctgaagacccaggggtgcggcatctacaaggactattacagatacaacttttcccaggggaacatccactgctctgacaagggaagctggtgtgagcagcagctgtgtgcctgtgacaaggaggtggccttctgcctgaagcgcaacctggacacctaccagaagcgactgcgtttctactggcggccccactgccgggggcagacccctgggtgctagaagcccacaccctctaccctgttcctcagcatggagctctggcatccccacctcagtatctaacctgaaccagcctggcttttcaaacactccggggggaggtagtcccagcctcccccggaaccctctaccaatgccttctgaccttctgaagctttccgaatcctcccagttgaggcagtagctgtgtcctctgagggtggatgggaatcttgggagaagcccaagcaagggagccatcagaggtggtgtttggaccaaagcatcggggtgggggaggggtctgccgctgtcccccgcctgctggcccccttgtccttcctcaccccctccaatatagtctcggagctgcaaccgcagcagccactataaagggcaatattaaaaaaaaaaaaaaaaaaaaaaaaaaaaa

SEQ ID NO: 150 - DNA, 1943 bp, Homo sapiens
gcctgactgtgttcttatttgctgggtctctctctggaaatctccactttgagtgtttccaacaactgtgattccatttttgtgaatgggaaggaaatgaagagcaaagtggacacgattgtgaacttcacccaccagcacttcacctcccagttcgaggtcactgtctgggcacccaggctccccctgcagattgagatctcagacaccgagctgagccagatcaagggctggaggatcccggttgctgccaacagaaggcctacccgggaaagcgatgacgaggacgatgaggagaagaagggacgaggctgctccctgcagtaccagcacgccacagtgcgtgtcctcacccagtttgtggccgagtcacctgacttagggcagctgacctacatgctgggccccgactggcagtttgacatcactgaccttgtgaccgagttcatgaaggtggaggagccgaaaatcgctcagttacaggacggcaggaccctggctggtcgggagccgggaataaccacggtgcaggtcctctcgccgttgtctgactccatcctggctgagaagacggtgattgtcctggatgaccgagtcaccatcgcggagctgggagtgcagctcgtagctggcatgtctctctccctgcagccacaccgagcagacaaaagggccatcgtctccacagctgctgccctggatgttcttcagtccccacagcaggaagcaatagtaagttcttggattttgttcagtgatggttcggtgacacctttagacatttacgatcctaaggattattctgttactgtctcatcattggatgaaatggtggtgtctgtccaggcaaaccttgagtccaaatggccaattgtggttgcagagggtgaaggacaagggcctttgattaagttagaaatgatgataagtgaaccttgtcagaagaccaagaggaagagtgttcttgccgtgggtaaaggaaatgtcaaggtcaaattcgaaccaagtagtgatgagcaccaaggaggcagcaatgatattgagggcataaatcgggaatataaagaccacctcagtaattccatagagcgcgaaggaaaccaggagagagcagtccaggaatggttccaccgtggcacacctgttggccaagaggaaagtaccaacaaaagcacaaccccccagtctcccatggaagggaagaataagttactcaaaagtggtggtccagatgcctttacaagcttccccactcaagggaagtcaccggaccccaataatcctagtgacctcacagtgacctcaagggggctaacggacttggagattggcatgtatgccttgctctgcgtcttctgtctggccattctggtcttcttgatcaactgcgtggcgtttgcctggaaatacagacacaaaaggtttgctgtgagtgagcagggcaacatcccccattcccacgactgggtctggcttgggaatgaagtggaacttttggagaaccctgttgacattacactcccatcagaggagtgcacaaccatgatagacaggggcctgcagttcgaggagaggaacttccttctgaatggcagttcccagaagacttttcatagtcaactactcagaccctctgactatgtctatgagaaagaaattaaaaatgaacctatgaattcttcgggcccaaagaggaagagagtcaagttcacttcctacaccaccatcctcccagaggacggcggcccatacaccaactccatcctgtttgacagcgatgataacatcaagtgggtctgccaagatatggggctgggggattcacaggactttagagactatatggaaagtctgcaagaccagatgtaaactcctttcttatgtttgtattcacctttatgccttctgttttttgaatgctggagcagtgagtttgatcagca

SEQ ID NO: 151 - DNA, 1403 bp, Homo sapiens
gaaaactactgtttcagtgttcaagcagtgattccctcccgaacagttaaccggaagagtacagacagcccggtagagtgtatgggccaggagaaaggggaattcagagaaatattctacatcattggagctgtggtatttgtggtcatcatccttgtcatcatcctggctatatctctacacaagtgtagaaaggcaggagtggggcagagctggaaggagaactccccactgaatgtttcataaaggaagcactgttggagctactgcaaatgctatattgcactgtgaccgagaacttttaagaggatagaatacatggaaacgcaaatgagtatttcggagcatgaagaccctggagttcaaaaaactcttgatatgacctgttattaccattagcattctggttttgacatcagcattagtcactttgaaatgtaacgaatggtactacaaccaattccaagttttaatttttaacaccatggcaccttttgcacataacatgctttagattatatattccgcactcaaggagtaaccaggtcgtccaagcaaaaacaaatgggaaaatgtcttaaaaaatcctgggtggacttttgaaaagcttttttttttttttttttttttgagacggagtcttgctctgttgcccaggctggagtgcagtagcacgatctcggctcactgcaccctccgtctctcgggttcaagcaattgtctgcctcagcctcccgagtagctgggattacaggtgcgcactaccacgccaagctaatttttgtattttttagtagagatggggtttcaccatcttggccaggctggtcttgaattcctgacctcaggtgatccacccaccttggcctcccaaagtgctagtattatgggcgtgaaccaccatgcccagccgaaaagcttttgaggggctgacttcaatccatgtaggaaagtaaaatggaaggaaattgggtgcatttctaggacttttctaacatatgtctataatatagtgtttaggttcttttttttttcaggaatacatttggaaattcaaaacaattggcaaactttgtattaatgtgttaagtgcaggagacattggtattctgggcaccttcctaatatgctttacaatctgcactttaactgacttaagtggcattaaacatttgagagctaactatatttttataagactactatacaaactacagagtttatgatttaaggtacttaaagcttctatggttgacattgtatatataattttttaaaaaggttttctatatggggattttctatttatgtaggtaatattgttctatttgtatatattgagataatttatttaatatactttaaataaaggtgactgggaattgtaaaaaaaaaaaaaaaaa

SEQ ID NO: 152 - DNA, 2758 bp, Homo sapiens
ggaagaggaggctttctaaggcggtcgctccgggaaatccgggccctaggattgtccactcatcccagtatcagcgagatacggggagatagagttagcgacaacgtgagccagagctggagcacgtttggtgagagaccagaaagcaatggaggccggagaggggaaggagcgcgttccgaaacaaaggcaagtcctgatattctttgttttgctgggcatagctcaggctagttgccagcctaggcactattcagtggccgaggaaacggagagtggctcctttgtggccaatttgttaaaagacctggggctggagataggagaacttgctgtgaggggggccagggtcgtttccaaaggaaaaaaaatgcatttgcagttcgataggcagaccggggatttgttgttaaatgagaaattggaccgggaggagctgtgcggccccacagagccctgtgtcctacctttccaggtgttactagaaaatcccttgcagttttttcaggcggagctacggattagggacgtaaatgatcattccccagttttcctagacaaagaaatacttttgaaaattccagaaagtatcactcctggaactactttcttaatagaacgtgcccaggacttggatgtaggaaccaacagtctccaaaattacacaatcagtcccaatttccactttcatcttaatttacaagacagtctcgatggcataatattaccacagctggtgctgaacagagccctggatcgcgaggagcagcctgagatcaggttaaccctcacagcgctagatggcgggagtccacccaggtccggcacggccctggtacggattgaagttgtggacatcaatgacaacgtcccagagtttgcaaagctgctctatgaggtgcagatcccggaggacagccccgttggatcccaggttgccatcgtctctgccagggatttagacattggaactaatggagaaatatcttatgcattttcccaagcatctgaagacattcgcaaaacgtttcgattaagtgcaaaatcgggagaactgcttttaagacagaaactggatttcgaatccatccagacatacacagtaaatattcaggcgacagatggtgggggcctatctggaacttgtgtggtatttgtccaagtgatggatttgaatgacaatcctccggaactaactatgtcgacacttatcaatcagatcccagaaaacttgcaggacaccctcattgctgtattcagcgtttcagatcctgactccggagacaacggaaggatggtgtgctccatccaagatgatcttccttttttcttgaaaccttctgttgagaacttttacactctggtgataagcacggccctggaccgggagaccagatccgaatacaacatcaccatcaccgtcaccgacttcgggacacccaggctgaaaaccgagcacaacataaccgtgctggtctccgacgtcaatgacaacgcccccgccttcacccaaacctcctacaccctgttcgtccgcgagaacaacagccccgccctgcacatcggcagcgtcagcgccacagacagagactcgggcaccaacgcccaggtcacctactcgctgctgccgccccaggacccgcacctgcccctcgcctccctggtctccatcaacgcggacaacggccacctgttcgctctccagtcgctggactacgaggccctgcaggcgttcgagttccgcgtgggcgccgcagaccgcggctccccggcgttgagcagcgaggcgctggtgcgcgtgctggtgctggacgccaacgacaactcgcccttcgtgctgtacccgctgcagaacggctccgcgccctgcaccgagctggtgccccgggcggccgagccgggctacctggtgaccaaggtggtggcggtggacggcgactcgggccagaacgcctggctgtcgtaccagctgctcaaggccacggagcccgggctgttcggcgtgtgggcgcacaatggcgaggtgcgcaccgccaggctgctgagggagcgcgacgctgccaagcagaggctggtggtgctggtcaaggacaatggcgagcctccgcgctcggccaccgccacgctgcacgtgctcctggtggacggcttctcccagccctacctgctgctcccggaggcggcaccggcccaggcccaggccgacttgctcaccgtctacctggtggtggcattggcctcggtgtcttcgctcttcctcttctcggtgctcctgttcgtggcggtgcggctgtgcaggaggagcagggcggcctcggtgggtcgctgctcggtgcccgagggcccctttccagggcagatggtggacgtgagcggcaccgggaccctgtcccagagctaccagtacgaggtgtgtctgactggagaatccgggacaaatgagttcaagttcctgaagccaattatccccaacttcgttgctcagggtgcagagagggttagcgaggcaaatcccagtttcaggaagagctttgaattcacttaagtgttaataaggatctactgaggctagtctcgtttaatttgtggaaagtccttttttactgctttgcccattggaggtgtctccttttattagaaagtaaccatcttattccaattctatgcatgttactggtatttataaatgtatgagtttttttgcggtataataaatgtaaattttctttgtattctaaaaaaaaaaaaaaaaaaaaaa

SEQ ID NO: 153 - DNA, 3403 bp, Homo sapiens
gggtccggcccaggaggcttgggcgcgcgcagccatcccgggcctcgccggggacctagggacgcaggcaacgcctgcgcccgctcaccatggtcgagggacgcgtctccgagttcctgaagaaactcggcttctcgggcgggggccgccagtaccaggcgctggagaaggacgaagaggaagccttgattgatgaacagagtgagctgaaagccatcgagaaagagaagaaggtgacagccctgccccccaaggaagcgtgcaaatgccagaaagaggatttggccagagcgttttgtgtggacttacacactgggctgtcggagttctcggtgacgcagcgccggctggcccatggctggaatgagtttgttgctgacaacagcgaacctgtgtggaagaaatacctggatcagtttaagaaccccctgatcctgctgctgctgggctctgccctggtgagtgtcctcaccaaggagtatgaggacgccgtcagcatcgccacggcagtgcttgtcgtggtcactgtcgccttcatccaggagtacaggtcggagaaatctctggaagagctgaccaagatggttcctccagaatgtaactgcctaagagaaggaaaactccagcacctgcttgctcgagaactggttcctggtgatgtcgtatctctctcgatcggagaccggatccctgcagacatccgactcactgaggtcacggacctcttggtggatgaatccagtttcaccggggaagccgagccatgtagtaaaacagacagccccttgacaggcggtggggacctcaccaccctcagcaacatcgtcttcatggggaccctggtgcagtatgggaggggccagggggtcgtgattggaacaggggaaagctctcagttcggagaagtgtttaagatgatgcaggctgaagagacacctaaaactcctttgcagaaaagcatggacaggctaggaaagcaactgacactcttctcctttggcataatcggtctcatcatgctcattggctggtcgcaagggaaacaactcctgagtatgttcacgatcggggtcagcctggctgtggcggccattccagagggtctgcccatcgtcgtcatggtgacgctggtcctgggagtgctgcggatggccaagaagcgggtcatcgtgaagaagttacccatcgtggagactttaggttgctgcagcgttctctgttctgacaagacggggactctgactgccaatgaaatgacagtgacccagcttgtaacgtcagatgggcttcgtgccgaggtcagcggagttgggtatgacggtcaagggactgtgtgtcttctaccatccaaggaagtcattaaggaattttccaatgtctcagtgggaaagttagtggaggcgggctgtgttgccaacaatgcggtcatcagaaagaacgccgtgatggggcagcccaccgagggtgcattgatggccctggcgatgaagatggacttaagtgatattaaaaattcatatataagaaaaaaagagattccattcagttcagagcagaagtggatggcggtgaaatgcagtctgaagactgaggatcaggaagacatttacttcatgaaaggggccttggaagaggtgatccgctactgcaccatgtacaacaacgggggcatccccctgccgctgacgccccagcagaggtcattctgcctgcaggaagagaagaggatggggtcgctcggtttgcgggtgctggccctggcttctgggcccgagctggggcggctgacgtttctcggtcttgtgggcatcattgaccccccgagagttggcgtgaaggaagcagtccaggttctctccgagtctggtgtgtctgtgaagatgataacgggggatgccctggagacggccttggccataggaagaaacatcggcctgtgcaacgggaagctgcaagccatgtccggggaggaggtggacagcgtggagaagggcgagctggccgaccgcgtggggaaggtgtccgtgttcttcaggaccagcccaaagcacaagctcaaaatcatcaaggctctgcaggagtcaggggcgatcgtggccatgactggggatggggtgaacgacgcagtggccctgaagtctgcagacattgggatcgccatggggcagacagggacggacgtcagcaaagaggccgccaacatgatcctggtggatgatgacttctcagccatcatgaatgcagtggaggaaggcaagggtattttttacaacatcaaaaactttgtccgattccagctgagcacgagcatctccgccctgagtctcatcactctgtccaccgtgttcaacctgcccagccccctcaacgccatgcagatcctatggatcaacatcatcatggatgggccaccggcgcagagcttgggggtagagcccgttgacaaagacgccttcaggcagccaccacggagtgtgcgggacaccatcctcagcagagccctcatcctgaagatcctcatgtccgcggccatcatcatcagcgggaccctctttatcttctggaaggagatgcctgaagacagagcaagcactccccgcaccacgacgatgacgttcacttgttttgtgtttttcgatctcttcaacgccttgacctgccgctctcagaccaagctgatatttgagatcggctttctcaggaaccacatgttcctctactccgtcctggggtccatcctggggcagctggcggtcatttacatccccccgctgcagagggtcttccagacggagaacctgggagcgcttgatttgctgtttttaactggattggcctcatccgtcttcattttgtcagagctcctcaaactatgtgaaaaatactgttgcagccccaagagagtccagatgcaccctgaagatgtgtagtggaccgcactccgcggcaccttccctaatcatctcgatctggttgtgactgtggcccctgccgtgtctcctcgtcaggggagacttttaggaggccgcagccttccatcaccggatcagtttttcctcttaggaaagctgcaggaacctcgtgggctccagggacccaggcccacatccatccagcgttcccgctggctgtgggacagacagggaggggcctgtacagaaacaccacactgtttattaaatcacaatgatttttattaaccatgtctaactacgtatctgtgccacagcttgcagtgaggcaggccactcgtggcagatacaaggggctcctgagaggcagtgggtaggatggtcacactctgcccattgccctcctggaggccccatttcctcatcataaaatgagggacttttaaataaagtgctatgccgggggataattaaaaaaaaaaaaaaaaaaa

SEQ ID NO: 154 - DNA, 1891 bp, Homo sapiens
cacttaacagccacttgtttcatcccacctgggcattaggttgacttcaaagatgcctcagttactgcaaaacattaatgggatcatcgaggccttcaggcgctatgcaaggacggagggcaactgcacagcgctcacccgaggggagctgaaaagactcttggagcaagagtttgccgatgtgattgtgaaaccccacgatccagcaactgtggatgaggtcctgcgtctgctggatgaagaccacacagggactgtggaattcaaggaattcctggtcttagtgtttaaagttgcccaggcctgtttcaagacactgagcgagagtgctgagggagcctgcggctctcaagagtctggaagcctccactctggggcctcgcaggagctgggcgaaggacagagaagtggcactgaagtgggaagggcggggaaagggcagcattatgaggggagcagccacagacagagccagcagggttccagagggcagaacaggcctggggttcagacccagggtcaggccactggctctgcgtgggtcagcagctatgacaggcaagctgagtcccagagccaggaaagaataagcccgcagatacaactctctgggcagacagagcagacccagaaagctggagaaggcaagaggaatcagacaacagagatgaggccagagagacagccacagaccagggaacaggacagagcccaccagacaggtgagactgtgactggatctggaactcagacccaggcaggtgccacccagactgtggagcaggacagcagccaccagacaggaagaaccagcaagcagacacaggaggccaccaatgaccagaacagagggactgagacccacggtcaaggcaggagccagaccagccaggctgtgacaggaggacatgctcagatacaggcagggacacacacccagacacccacccagaccgtggagcaggacagcagccaccagacaggaagcaccagcacccagacacaggagtccaccaatggccagaacagagggactgagatccacggtcaaggcaggagccagaccagccaggctgtgacaggaggacacactcagatacaggcagggtcacacaccgagactgtggagcaggacagaagccaaactgtaagccacggaggggctagagaacagggacagacccagacgcagccaggcagtggtcaaagatggatgcaagtgagcaaccctgaggcaggagagacagtaccgggaggacaggcccagactggggcaagcactgagtcaggaaggcaggagtggagcagcactcacccaaggcgctgtgtgacagaagggcagggagacagacagcccacagtggttggtgaggaatgggttgatgaccactcaagggagacagtgatcctcaggctggaccagggcaacttgcataccagtgtttcctcagcacagggccaggatgcagcccagtcagaagagaagcgaggcatcacagctagagagctgtattcctacttgagaagcaccaagccatgacttccccgactccaatgtccagtactggaagaagacagctggagagagtttggcttgtcctgcatggccaatccagtgggtgcatccctggacatcagctcttcattatgcagcttcccttttaggtctttctcaatgagataatttctgcaaggagctttctatcctgaactcttctttcttacctgctttgcggtgcagaccctctcaggagcaggaagactcagagcaagtcacccctttgtactgaattgtcctcatcttgtggggggtttcaggactatttttatctctgacatctctctattgccccatctaccctaatgcatcaataaaaccttaagccgctgg

SEQ ID NO: 155 - DNA, 11415 bp, Homo sapiens
agagaaggagggaagcgggagatttttcttgactgccccctttccttcaaacattttataggcttcagggagagagaggaggaggagagagggaagaaaaaaagaggagagcgagaggggtagagagcgcgcgccgttccctccggagttcccgagctgctgaggagtctggattgtgtctgtccccagtgtcagatgaaagggcgctgaggctcttggccgctgccccgcgcccagctccgcgcacgcccctctgcgagtccggccgcccagcgcctcttcccgcccgagccgccgcctgcgctccggggcagccgctctgtctccagcgcgatgtggcctcgcctggccttttgttgctggggtctggcgctcgtttcgggctgggcgacctttcagcagatgtccccgtcgcgcaatttcagcttccgcctcttccccgagaccgcgcccggggcccccgggagtatccccgcgccgcccgctcctggcgacgaagcggcggggagcagagtggagcggctgggccaggcgttccggcgacgcgtgcggctgctgcgggagctcagcgagcgcctggagcttgtcttcctggtggatgattcgtccagcgtgggcgaagtcaacttccgcagcgagctcatgttcgtccgcaagctgctgtccgacttccccgtggtgcccacggccacgcgcgtggccatcgtgaccttctcgtccaagaactacgtggtgccgcgcgtcgattacatctccacccgccgcgcgcgccagcacaagtgcgcgctgctcctccaagagatccctgccatctcctaccgaggtggcggcacctacaccaagggcgccttccagcaagccgcgcaaattcttcttcatgctagagaaaactcaacaaaagttgtatttctcatcactgatggatattccaatgggggagaccctagaccaattgcagcgtcactgcgagattcaggagtggagatcttcacttttggcatatggcaagggaacattcgagagctgaatgacatggcttccaccccaaaggaggagcactgttacctgctacacagttttgaagaatttgaggctttagctcgccgggcattgcatgaagatctaccttctgggagttttattcaagatgatatggtccactgctcatatctttgtgatgaaggcaaggactgctgtgaccgaatgggaagctgcaaatgtgggacacacacaggccattttgagtgcatctgtgaaaaggggtattacgggaaaggtctgcagtatgaatgcacagcttgcccatcggggacatacaaacctgaaggctcaccaggaggaatcagcagttgcattccatgtcctgatgaaaatcacacctctccacctggaagcacatcccctgaagactgtgtctgcagagagggatacagggcatctggccagacctgtgaacttgtccactgccctgccctgaagcctcccgaaaatggttactttatccaaaacacttgcaacaaccacttcaatgcagcctgtggggtccgatgtcaccctggatttgatcttgtgggaagcagcatcatcttatgtctacccaatggtttgtggtccggttcagagagctactgcagagtaagaacatgtcctcatctccgccagccgaaacatggccacatcagctgttctacaagggaaatgttatataagacaacatgtttggttgcctgtgatgaagggtacagactagaaggcagtgataagcttacttgtcaaggaaacagccagtgggatgggccagaaccccggtgtgtggagcgccactgttccacctttcagatgcccaaagatgtcatcatatccccccacaactgtggcaagcagccagccaaatttgggacgatctgctatgtaagttgccgccaagggttcattttatctggagtcaaagaaatgctgagatgtaccacttctggaaaatggaatgtcggagttcaggcagctgtgtgtaaagacgtggaggctcctcaaatcaactgtcctaaggacatagaggctaagactctggaacagcaagattctgccaatgttacctggcagattccaacagctaaagacaactctggtgaaaaggtgtcagtccacgttcatccagctttcaccccaccttaccttttcccaattggagatgttgctatcgtatacacggcaactgacctatccggcaaccaggccagctgcattttccatatcaaggttattgatgcagaaccacctgtcatagactggtgcagatctccacctcccgtccaggtctcggagaaggtacatgccgcaagctgggatgagcctcagttctcagacaactcaggggctgaattggtcattaccagaagtcatacacaaggagaccttttccctcaaggggagactatagtacagtatacagccactgacccctcaggcaataacaggacatgtgatatccatattgtcataaaaggttctccctgtgaaattccattcacacctgtaaatggggattttatatgcactccagataatactggagtcaactgtacattaacttgcttggagggctatgatttcacagaagggtctactgacaagtattattgtgcttatgaagatggcgtctggaaaccaacatataccactgaatggccagactgtgccaaaaaacgttttgcaaaccacgggttcaagtcctttgagatgttctacaaagcagctcgttgtgatgacacagatctgatgaagaagttttctgaagcatttgagacgaccctgggaaaaatggtcccatcattttgtagtgatgcagaggacattgactgcagactggaggagaacctgaccaaaaaatattgcctagaatataattatgactatgaaaatggctttgcaattggaccaggtggctggggtgcagctaataggctggattactcttacgatgacttcctggacactgtgcaagaaacagccacaagcatcggcaatgccaagtcctcacggattaaaagaagtgccccattatctgactataaaattaagttaatttttaacatcacagctagtgtgccattacccgatgaaagaaatgatacccttgaatgggaaaatcagcaacgactccttcagacattggaaactatcacaaataaactgaaaaggactctcaacaaagaccccatgtattcctttcagcttgcatcagaaatacttatagccgacagcaattcattagaaacaaaaaaggcttcccccttctgcagaccaggctcagtgctgagagggcgtatgtgtgtcaattgccctttgggaacctattataatctggaacatttcacctgtgaaagctgccggatcggatcctatcaagatgaagaagggcaacttgagtgcaagctttgcccctctgggatgtacacggaatatatccattcaagaaacatctctgattgtaaagctcagtgtaaacaaggcacctactcatacagtggacttgagacttgtgaatcgtgtccactgggcacttatcagccaaaatttggttcccggagctgcctctcgtgtccagaaaacacctcaactgtgaaaagaggagccgtgaacatttctgcatgtggagttccttgtccagaaggaaaattctcgcgttctgggttaatgccctgtcacccatgtcctcgtgactattaccaacctaatgcagggaaggccttctgcctggcctgtcccttttatggaactaccccattcgctggttccagatccatcacagaatgttcaagttttagttcaactttctcagcggcagaggaaagtgtggtgccccctgcctctcttggacatattaaaaagaggcatgaaatcagcagtcaggttttccatgaatgcttctttaacccttgccacaatagtggaacctgccagcaacttgggcgtggttatgtttgtctctgtccacttggatatacaggcttaaagtgtgaaacagacatcgatgagtgcagcccactgccttgcctcaacaatggagtttgtaaagacctagttggggaattcatttgtgagtgcccatcaggttacacaggtcagcggtgtgaagaaaatataaatgagtgtagctccagtccttgtttaaataaaggaatctgtgttgatggtgtggctggctatcgttgcacatgtgtgaaaggatttgtaggcctgcattgtgaaacagaagtcaatgaatgccagtcaaacccatgcttaaataatgcagtctgtgaagaccaggttgggggattcttgtgcaaatgcccacctggatttttgggtacccgatgtggaaagaacgtcgatgagtgtctcagtcagccatgcaaaaatggagctacctgtaaagacggtgccaatagcttcagatgcctgtgtgcagctggcttcacaggatcacactgtgaattgaacatcaatgaatgtcagtctaatccatgtagaaatcaggccacctgtgtggatgaattaaattcatacagttgtaaatgtcagccaggattttcaggcaaaaggtgtgaaacagaacagtctacaggctttaacctggattttgaagtttctggcatctatggatatgtcatgctagatggcatgctcccatctctccatgctctaacctgtaccttctggatgaaatcctctgacgacatgaactatggaacaccaatctcctatgcagttgataacggcagcgacaataccttgctcctgactgattataacggctgggttctttatgtgaatggcagggaaaagataacaaactgtccctcggtgaatgatggcagatggcatcatattgcaatcacttggacaagtgccaatggcatctggaaagtctatatcgatgggaaattatctgacggtggtgctggcctctctgttggtttgcccatacctggtatgtttggtggtggtgcgttagttctggggcaagagcaagacaaaaaaggagagggattcagcccagctgagtcttttgtgggctccataagccagctcaacctctgggactatgtcctgtctccacagcaggtgaagtcactggctacctcctgcccagaggaactcagtaaaggaaacgtgttagcatggcctgatttcttgtcaggaattgtggggaaagtgaagatcgattctaagagcatattttgttctgattgcccacgcttaggagggtcagtgcctcatctgagaactgcatctgaagatttaaagccaggttccaaagtcaatctgttctgtgatccaggcttccagctggtcgggaaccctgtgcagtactgtctgaatcaaggacagtggacacaaccacttcctcactgtgaacgcattagctgtggggtgccacctcctttggagaatggcttccattcagccgatgacttctatgctggcagcacagtaacctaccagtgcaacaatggctactatctattgggtgactcaaggatgttctgtacagataatgggagctggaacggcgtttcaccatcctgccttgatgtcgatgagtgtgcagttggatcagattgtagtgagcatgcttcttgcctgaacgtagatggatcctacatatgttcatgtgtcccaccgtacacaggagatgggaaaaactgtgcagaacctataaaatgtaaggctccaggaaatccggaaaatggccactcctcaggtgagatttatacagtaggtgccgaagtcacattttcgtgtcaggaaggataccagttgatgggagtaaccaaaatcacatgtttggagtctggagaatggaatcatctaataccatattgtaaagctgtttcatgtggtaaaccggctattccagaaaatggttgcattgaggagttagcatttacttttggcagcaaagtgacatataggtgtaataaaggatatactctggccggtgataaagaatcatcctgtcttgctaacagttcttggagtcattcccctcctgtgtgtgaaccagtgaagtgttctagtccggaaaatataaataatggaaaatatattttgagtgggcttacctacctttctactgcatcatattcatgcgatacaggatacagcttacagggcccttccattattgaatgcacggcttctggcatctgggacagagcgccacctgcctgtcacctcgtcttctgtggagaaccacctgccatcaaagatgctgtcattacggggaataacttcactttcaggaacaccgtcacttacacttgcaaagaaggctatactcttgctggtcttgacaccattgaatgcctggccgacggcaagtggagtagaagtgaccagcagtgcctggctgtctcctgtgatgagccacccattgtggaccacgcctctccagagactgcccatcggctctttggagacattgcattctactactgctctgatggttacagcctagcagacaattcccagcttctctgcaatgcccagggcaagtgggtacccccagaaggtcaagacatgccccgttgtatagctcatttctgtgaaaaacctccatcggtttcctatagcatcttggaatctgtgagcaaagcaaaatttgcagctggctcagttgtgagctttaaatgcatggaaggctttgtactgaacacctcagcaaagattgaatgtatgagaggtgggcagtggaacccttcccccatgtccatccagtgcatccctgtgcggtgtggagagccaccaagcatcatgaatggctatgcaagtggatcaaactacagttttggagccatggtggcttacagctgcaacaaggggttctacatcaaaggggaaaagaagagcacctgcgaagccacagggcagtggagtagtcctataccgacgtgccacccggtatcttgtggtgaaccacctaaggttgagaatggctttctggagcatacaactggcaggatctttgagagtgaagtgaggtatcagtgtaacccgggctataagtcagtcggaagtcctgtatttgtctgccaagccaatcgccactggcacagtgaatcccctctgatgtgtgttcctctcgactgtggaaaacctcccccgatccagaatggcttcatgaaaggagaaaactttgaagtagggtccaaggttcagtttttctgtaatgagggttatgagcttgttggtgacagttcttggacatgtcagaaatctggcaaatggaataagaagtcaaatccaaagtgcatgcctgccaagtgcccagagccgcccctcttggaaaaccagctagtattaaaggagttgaccaccgaggtaggagttgtgacattttcctgtaaagaagggcatgtcctgcaaggcccctctgtcctgaaatgcttgccatcccagcaatggaatgactctttccctgtttgtaagattgttctttgtaccccacctcccctaatttcctttggtgtccccattccttcttctgctcttcattttggaagtactgtcaagtattcttgtgtaggtgggtttttcctaagaggaaattctaccaccctctgccaacctgatggcacctggagctctccactgccagaatgtgttccagtagaatgtccccaacctgaggaaatccccaatggaatcattgatgtgcaaggccttgcctatctcagcacagctctctatacctgcaagccaggctttgaattggtgggaaatactaccaccctttgtggagaaaatggtcactggcttggaggaaaaccaacatgtaaagccattgagtgcctgaaacccaaggagattttgaatggcaaattctcttacacggacctacactatggacagaccgttacctactcttgcaaccgaggctttcggctcgaaggtcccagtgccttgacctgtttagagacaggtgattgggatgtagatgccccatcttgcaatgccatccactgtgattccccacaacccattgaaaatggttttgtagaaggtgcagattacagctatggtgccataatcatctacagttgcttccctgggtttcaggtggctggtcatgccatgcagacctgtgaagagtcaggatggtcaagttccatcccaacatgtatgccaatagactgtggcctccctcctcatatagattttggagactgtactaaactcaaagatgaccagggatattttgagcaagaagacgacatgatggaagttccatatgtgactcctcaccctccttatcatttgggagcagtggctaaaacctgggaaaatacaaaggagtctcctgctacacattcatcaaactttctgtatggtaccatggtttcatacacctgtaatccaggatatgaacttctggggaaccctgtgctgatctgccaggaagatggaacttggaatggcagtgcaccatcctgcatttcaattgaatgtgacttgcctactgctcctgaaaatggctttttgcgttttacagagactagcatgggaagtgctgtgcagtatagctgtaaacctggacacattctagcaggctctgacttaaggctttgtctagagaatagaaagtggagtggtgcctccccacgctgtgaagccatttcatgcaaaaagccaaatccagtcatgaatggatccatcaaaggaagcaactacacatacctgagcacgttgtactatgagtgtgaccccggatatgtgctgaatggcactgagaggagaacatgccaggatgacaaaaactgggatgaggatgagcccatttgcattcctgtggactgcagttcacccccagtctcagccaatggccaggtgagaggagacgagtacacattccaaaaagagattgaatacacttgcaatgaagggttcttgcttgagggagccaggagtcgggtttgtcttgccaatggaagttggagtggagccactcccgactgtgtgcctgtcagatgtgccaccccgccacaactggccaatggggtgacggaaggcctggactatggcttcatgaaggaagtaacattccactgtcacgagggctacatcttgcacggtgctccaaaactcacctgtcagtcagatggcaactgggatgcagagattcctctctgtaaaccagtcaactgtggacctcctgaagatcttgcccatggtttccctaatggtttttcctttattcatgggggccatatacagtatcagtgctttcctggttataagctccatggaaattcatcaagaaggtgcctctccaatggctcctggagtggcagctcaccttcctgcctgccttgcagatgttccacaccagtaattgaatatggaactgtcaatgggacagattttgactgtggaaaggcagcccggattcagtgcttcaaaggcttcaagctcctaggactttctgaaatcacctgtgaagccgatggccagtggagctctgggttcccccactgtgaacacacttcttgtggttctcttccaatgataccaaatgcgttcatcagtgagaccagctcttggaaggaaaatgtgataacttacagctgcaggtctggatatgtcatacaaggcagttcagatctgatttgtacagagaaaggggtatggagccagccttatccagtctgtgagcccttgtcctgtgggtccccaccgtctgtcgccaatgcagtggcaactggagaggcacacacctatgaaagtgaagtgaaactcagatgtctggaaggttatacgatggatacagatacagatacattcacctgtcagaaagatggtcgctggttccctgagagaatctcctgcagtcctaaaaaatgtcctctcccggaaaacataacacatatacttgtacatggggacgatttcagtgtgaataggcaagtttctgtgtcatgtgcagaagggtatacctttgagggagttaacatatcagtatgtcagcttgatggaacctgggagccaccattctccgatgaatcttgcagtccagtttcttgtgggaaacctgaaagtccagaacatggatttgtggttggcagtaaatacacctttgaaagcacaattatttatcagtgtgagcctggctatgaactagaggggaacagggaacgtgtctgccaggagaacagacagtggagtggaggggtggcaatatgcaaagagaccaggtgtgaaactccacttgaatttctcaatgggaaagctgacattgaaaacaggacgactggacccaacgtggtatattcctgcaacagaggctacagtcttgaagggccatctgaggcacactgcacagaaaatggaacctggagccacccagtccctctctgcaaaccaaatccatgccctgttccttttgtgattcccgagaatgctctgctgtctgaaaaggagttttatgttgatcagaatgtgtccatcaaatgtagggaaggttttctgctgcagggccacggcatcattacctgcaaccccgacgagacgtggacacagacaagcgccaaatgtgaaaaaatctcatgtggtccaccagctcacgtagaaaatgcaattgctcgaggcgtacattatcaatatggagacatgatcacctactcatgttacagtggatacatgttggagggtttcctgaggagtgtttgtttagaaaatggaacatggacatcacctcctatttgcagagctgtctgtcgatttccatgtcagaatgggggcatctgccaacgcccaaatgcttgttcctgtccagagggctggatggggcgcctctgtgaagaaccaatctgcattcttccctgtctgaacggaggtcgctgtgtggccccttaccagtgtgactgcccgcctggctggacggggtctcgctgtcatacagctgtttgccagtctccctgcttaaatggtggaaaatgtgtaagaccaaaccgatgtcactgtctttcttcttggacgggacataactgttccaggaaaaggaggactgggttttaaccactgcacgaccatctggctctcccaaaagcaggatcatctctcctcggtagtgcctgggcatcctggaacttatgcaaagaaagtccaacatggtgctgggtcttgtttagtaaacttgttacttggggttactttttttattttgtgatatattttgttattccttgtgacatactttcttacatgtttccatttttaaatatgcctgtattttctatataaaaattatattaaatagatgctgctctaccctcacaaaatgtacatattctgctgtctattgggaaagttcctggtacacatttttattcagttacttaaaatgatttttccattaaagtatattttgctact

SEQ ID NO: 156 - DNA, 1817 bp, Homo sapiens
attcattactacagggcaggaagggcacgttctcatcagcatgagggagtgcctttccatccacatcggtcaagctggcatccagattggggacgcctgctgggaactctattgcctggaacatggaatccagccaaatggcgttgttcttgacactcaacaggatcagctggaaaatgcaaaaatggagcacacaaatgcatctttcgataccttcttctgtgagacaagagctgggaagcatgtgcctagagcactcttcgtggacttggagccaactgttatagatgggatccggacgggccagcaccgttcactcttccaccccgagcagctccttagcggaaaggaggatgctgccaacaattacgcgcgaggccgttactctgtggggtcggaggtcatcgaccttgtgctggagaggacccggaagctggcagaacagtgtggtggacttcagggatttttgattttccgaagctttggaggaggcactggttcagggtttacgtctctcttaatggagaggctcacaggagaatatagcagaaagactaagctggagttctcggtctacccagcccccaggatctccactgccgtggtagagccttataactctgtcctcaccacccactccaccacagagcacacggactgtaccttcatggtggacaacgaggccgtctatgatatatgccatcgtaaactcggtgttgaatgcccctctcatgccagcatcaatagattggtggttcaggtggtatcttccatcactgcctccctccggtttgaagggcccttgaatgtagacctaattgaattccagaccaacctggtaccttatccgagaatacatttccccatgacagccttcgcccccatcgtctctgctgacaaagcctaccatgagcagttctctgtgtcagacatcaccactgcttgctttgagtcctccaaccagctggtcaagtgtgatcctcggcttgggaagtacatggcctgctgcctactctatagaggggatgtggtccccaaggaagtgaatgcagcaatcgcagccacgaagtcgaggcactctgttcagtttgtagattggtgtccaactggtttcaaggtgggcatcaacaatcggccgcccacggtgatgccgggtggggacctggccaaagtccaccggtccatctgcatgctgagcaacaccacggcgattgtggaggcctgggcccgcctggaccacaagtttgacctcatgtacgccaagagagcatttctgcactggtacctcagagaaggcatggaagaagcagagttcttggaggccagggaagatctggcagccctggagagggactatgaggaagtggcgcaaagtttctgaggcatgtatgatgggtgcaaatgaatgtcaagttaaaatggcatgttttcttttcaagccgttatatgcctagtgggtagttcccctgatgagcagaaaaatgaactcaaatcaggcaagactctaggttccacactaaattaagtgggtcagtaccaacaatgaacacattatttcctggtctactggtacaagtcagctctgctacctgggagcctttggaagcttagagtcctttgaactgctgagtcacttctaggtgggatttttttgttttaccaagagacaatgaaatcctaaagtttatgcttttcctttctggtaccggaagtagaaaacagcacatgttgattacgaatgttttttcccccatgtctacattttttacactgattaaatcataaatattttcagtatgaaaaaaaaaaaaaaaaaa

SEQ ID NO: 157 - DNA, 2428 bp, Homo sapiens; identical to SEQ ID NO: 39

SEQ ID NO: 158 - DNA, 3530 bp, Homo sapiens
gcaatactcagtggataaaaggcttgcagtcccagctgggaaaaagagtcccattatctcccagctgcatagacattccatacggcttggttctgcctggacgcacagcatgcctggctgagagcttgaaacagagttctgcagaaaaactgtaaagatcccgagacatttccctggtaagatctactcttgagatactgactggaagatagactgttttgttccacctgattgtatgggagaaatttttgaccttagaaagtggaaatgaggttgctatggaaactggtaattctgctgccactcataaactcttctgcaggtgatggtcttttaagccgtcctatttttactcaggagccacatgatgtcatttttcctttggatttatcaaaatctgaggtcatcctgaattgtgctgctaatggttacccttcgcctcattataggtggaagcaaaatggcacagacattgattttactatgagttatcactacaggttggatggaggcagtcttgcaatcaatagcccccacacagatcaagatattggcatgtaccagtgcctggccaccaatcttctggggacaattctgagtcggaaggcaaagctccaatttgcatatattgaagactttgaaactaaaacaagaagcacagtatctgtccgagaaggtcaaggtgtggtgcttctctgtggcccaccgccacattttggagatttatcttatgcatggaccttcaatgataaccccttatacgtccaagaggacaataggcgatttgtatctcaagagacgggaaacttgtacattgccaaagtggaaccatcagatgtgggcaactacacttgctttataactaacaaagaggcccagagaagtgttcaaggtccacccactccattagtgcagcgcactgatggtgtgatgggggaatatgaaccaaagattgaagtgcgttttcctgaaactatacaagctgcaaaggattcatctgtaaaactggaatgttttgcccttggaaatccagtccccgatattagttggagaaggttggacgggagcccgttgccagggaaagtcaagtacagcaaatcccaagctatccttgaaatcccgaacttccaacaagaagatgaaggcttttatgagtgcattgcaagcaaccttcgaggaagaaaccttgcaaagggtcaactcattttttatgctcctccagaatgggaacagaaaatccaaaatacacacctctctatctatgacaacttgctctgggaatgtaaagctagtggaaagccaaacccttggtatacatggttaaaaaatggtgaacgactcaacccagaggagagaattcaaatagaaaatgggacactcatcataacgatgctgaatgtgtcagattctggtgtgtaccaatgtgctgcagaaaacaaatatcagataatttatgcaaatgctgaattgagagttttagcctcagctccagatttctccaaaagtccagttaaaaaaaagtcttttgttcaagttggtggggatattgttatcggatgcaaaccaaatgcttttcccagggcagctatctcttggaaaagaggaacggagacccttagacaaagcaaaagaatatttctcttggaggatggcagcctcaagatatataatattaccaggtcagatgctggatcatatacatgcatagccacaaatcagtttggcactgcaaagaacactggcagcctcattgtaaaagagagaactgtcattaccgtcccaccttccaaaatggatgttacagttggcgagagtatagtgctaccatgccaggtgtcccatgacccctccattgaagtggtatttgtatggtttttcaatggagatgtcatagacttaaaaaaaggagtggctcattttgaaaggattggaggagaatctgttggggatttgatgataaggaatattcagttacatcattcaggaaaatatctctgcacagtacaaacaaccctagaaagtttatctgcagtagccgatatcattgttagaggtccaccaggtcctcctgaggatgtgcaagtggaagacatttccagtactacttctcaactaagttggagagcaggcccagataataacagtcccattcaaatatttactattcagactcggacaccattttctgtgggttggcaggctgttgctacagttccagaaattctcaatggtaagacatacaatgcaacagtggttggtttgagtccttgggtggaatatgaatttcgtgttgttgccggcaacagcattgggattggagaaccaagtgaaccatcagaattgttaagaactaaagcatcagtccctgttgtggcaccagtaaacatccatggaggtggaggaagtcggtctgaactcgtcattacgtgggagtcaattccagaagaactgcagaatggggagggatttggatatatcatcatgttccggccagtgggctcgacaacctggtccaaggagaaagtgtcatctgtggaatcatcaaggtttgtctacagaaatgaaagcatcatcccactgtctccctttgaagtcaaagtgggtgtgtataataatgaaggagaaggatccctgagtactgtgaccattgtctactctggggaagatgaacctcaactggccccaaggggaacttctctccagagtttttctgcttctgaaatggaggtttcatggaatgctattgcctggaatagaaacactggaagagtgctgggctatgaggtcttatactggacagatgactccaaagaatccatgataggtaaaattagagtcagtggaaatgtcacaaccaaaaacatcacggggctgaaagctaataccatctactttgcttccgtaagagcttacaacactgctgggacagggccctcaagccccccagtcaatgttaccaccaaaaagtctcctccaagccaaccaccagcaaacattgcctggaagctgacaaactctaaattatgcttgaactgggagcatgtaaaaaccatggaaaatgagtctgaagttttggggtacaagattctgtaccggcaaaacagacagagtaaaactcatattttggaaacaaacaatacatcagctgagcttctggttccatttgaagaagactacttaattgaaataagaacagtcagtgatggtggagatggaagcagcagtgaggaaattaggattccaaaaatgtcaagtttgagttccagaggaattcaattcttagaacctagcacccattttctttccattgtcattgtgatttttcactgttttgctattcagccacttatctgatgaataaaaccataaatctttgagagttttttgaaagcaaatcattctgtatatatgctctccagcctctgacacaagatgcgttcttaatacagacttgtttgcaaagaaaaaaaaaagtatattattaaaatcctgtaaatatctatggtatattaataaaacaattttaaaca

SEQ ID NO: 159 - DNA, 1503 bp, Homo sapiens
cctccctcccttcctcttactctcattcatttcatacacactggctcacacatctactctctctctctatctctctcagaatgacaattctaggtacaacttttggcatggttttttctttacttcaagtcgtttctggagaaagtggctatgctcaaaatggagacttggaagatgcagaactggatgactactcattctcatgctatagccagttggaagtgaatggatcgcagcactcactgacctgtgcttttgaggacccagatgtcaacatcaccaatctggaatttgaaatatgtggggccctcgtggaggtaaagtgcctgaatttcaggaaactacaagagatatatttcatcgagacaaagaaattcttactgattggaaagagcaatatatgtgtgaaggttggagaaaagagtctaacctgcaaaaaaatagacctaaccactatagttaaacctgaggctccttttgacctgagtgtcatctatcgggaaggagccaatgactttgtggtgacatttaatacatcacacttgcaaaagaagtatgtaaaagttttaatgcacgatgtagcttaccgccaggaaaaggatgaaaacaaatggacgcatgtgaatttatccagcacaaaactgacactcctgcagagaaagctccaaccggcagcaatgtatgagattaaagttcgatccatccctgatcactattttaaaggcttctggagtgaatggagtccaagttattacttcagaactccagagatcaataatagctcaggggagatggatcctatcttactaaccatcagcattttgagttttttctctgtcgctctgttggtcatcttggcctgtgtgttatggaaaaaaaggattaagcctatcgtatggcccagtctccccgatcataagaagactctggaacatctttgtaagaaaccaagaaaaaatttaaatgtgagtttcaatcctgaaagtttcctggactgccagattcatagggtggatgacattcaagctagagatgaagtggaaggttttctgcaagatacgtttcctcagcaactagaagaatctgagaagcagaggcttggaggggatgtgcagagccccaactgcccatctgaggatgtagtcatcactccagaaagctttggaagagattcatccctcacatgcctggctgggaatgtcagtgcatgtgacgcccctattctctcctcttccaggtccctagactgcagggagagtggcaagaatgggcctcatgtgtaccaggacctcctgcttagccttgggactacaaacagcacgctgccccctccattttctctccaatctggaatcctgacattgaacccagttgctcagggtcagcccattcttacttccctgggatcaaatcaagaagaagcatatgtcaccatgtccagcttctaccaaaaccagtgaagtgtaagaaacccagactgaacttaccgtgagcgacaaagat

SEQ ID NO: 160 - DNA, 1430 bp, Homo sapiens
cttctctcaccatgagctggctctccagttcccagggagtggtactaacagcctaccaccccagcggcaaggaccaggccgtcgggaacagccatgcaaaggcaggggaggaagccacctcgagtcgcagatatggccagtacactatgaaccaggaaagcaccaccatcaaagttatggagaagcctccatttgatcgatcaatttcccaggattctttggatgaactatctatggaagactattggatagaactagaaaacatcaagaaatctagtgaaaacagccaagaagatcaagaggtggttgttgtcaaagagcctgatgagggagaattggaagaagagtggcttaaagaggccggtttatccaatctcttcggagagtctgctggagatccacaggaaagcattgtgtttttatcaacattgacgcggacccaggcagcagcagttcagaagcgagtagagacggtctcccagaccttgaggaaaaaaaacaaacagtaccagattcctgacgtcagagacatatttgctcaacagagagaatcaaaagaaacagctccaggtggcactgaatcgcagtcacttagaacaaatgaaaacaaataccaaggaagagatgacgaggcatctaaccttgttggtgaagagaagctgatcccacctgaggagacgcctgcccctgaaacagacatcaacctggaggtatcatttgccgagcaagcactcaatcagaaagagagctccaaggagaaaatccagaagagcaaaggcgatgatgccacattacctagtttcagattgccaaaagacaaaacgggtaccacaaggattggtgacctcgcaccccaggacatgaagaaagtttgccatttagccctaattgagctgactgccctctatgatgtattgggtattgagctggaacaacaaaaagctgtgaaaatcaaaacaaaagattctggtcttttttgcgttccattgacagcgctattagaacaagatcagaggaaagtaccaggaatgcgaatacccttgatctttcaaaaactgatttctcgaattgaagagagaggtttggaaacagaaggcctcttacggatccctggagctgccattagaatcaagaatctttgccaagaactagaagcaaagttttatgaagggacttttaattgggaaagtgtcaaacagcatgatgccgccagcctgctgaagctcttcattcgggagttgccccagccactgctcagtgtggagtatctcaaagcctttcaggctgtccagaatcttccaaccaagaagcagcaactacaggctttgaaccttcttgtcatcctcctacctgatgcaaacagggacacactgaaggcccttcttgaatttctccaaagagtaatagataataaaaaaaaaaaaaaaaaa

SEQ ID NO: 161 - DNA, 6619 bp, Homo sapiens
gaattcccttacaaacgcctccagcttgtagaggcggtcgtggaggacccagaggaggagacgaaggggaaggaggcggtggtggaggaggcaaaggccttggacgaccattgttggcgaggggcaccactccgggagaggcggcgctgggcgtcttgggggtgcgcgccgggagcctgcagcgggaccagcgtgggaacgcggctggcaggctgtggacctcgtcctcaccaccatggtcgggctccttttgttttttttcccagcgatctttttggaggtgtcccttctccccagaagccccggcaggaaagtgttgctggcaggagcgtcgtctcagcgctcggtggccagaatggacggagatgtcatcattggagccctcttctcagtccatcaccagcctccggccgagaaagtgcccgagaggaagtgtggggagatcagggagcagtatggcatccagagggtggaggccatgttccacacgttggataagatcaacgcggacccggtcctcctgcccaacatcaccctgggcagtgagatccgggactcctgctggcactcttccgtggctctggaacagagcattgagttcattagggactctctgatttccattcgagatgagaaggatgggatcaaccggtgtctgcctgacggccagtccctccccccaggcaggactaagaagcccattgcgggagtgatcggtcccggctccagctctgtagccattcaagtgcagaacctgctccagctcttcgacatcccccagatcgcttattcagccacaagcatcgacctgagtgacaaaactttgtacaaatacttcctgagggttgtcccttctgacactttgcaggcaagggccatgcttgacatagtcaaacgttacaattggacctatgtctctgcagtccacacggaagggaattatggggagagcggaatggacgctttcaaagagctggctgcccaggaaggcctctgtatcgcccattctgacaaaatctacagcaacgctggggagaagagctttgaccgactcttgcgcaaactccgagagaggcttcccaaggctagagtggtggtctgcttctgtgaaggcatgacagtgcgaggactcctgagcgccatgcggcgccttggcgtcgtgggcgagttctcactcattggaagtgatggatgggcagacagagatgaagtcattgaaggttatgaggtggaagccaacgggggaatcacgataaagctgcagtctccagaggtcaggtcatttgatgattatttcctgaaactgaggctggacactaacacgaggaatccctggttccctgagttctggcaacatcggttccagtgccgccttccaggacaccttctggaaaatcccaactttaaacgaatctgcacaggcaatgaaagcttagaagaaaactatgtccaggacagtaagatggggtttgtcatcaatgccatctatgccatggcacatgggctgcagaacatgcaccatgccctctgccctggccacgtgggcctctgcgatgccatgaagcccatcgacggcagcaagctgctggacttcctcatcaagtcctcattcattggagtatctggagaggaggtgtggtttgatgagaaaggagacgctcctggaaggtatgatatcatgaatctgcagtacactgaagctaatcgctatgactatgtgcacgttggaacctggcatgaaggagtgctgaacattgatgattacaaaatccagatgaacaagagtggagtggtgcggtctgtgtgcagtgagccttgcttaaagggccagattaaggttatacggaaaggagaagtgagctgctgctggatttgcacggcctgcaaagagaatgaatatgtgcaagatgagttcacctgcaaagcttgtgacttgggatggtggcccaatgcagatctaacaggctgtgagcccattcctgtgcgctatcttgagtggagcaacatcgaatccattatagccatcgccttttcatgcctgggaatccttgttaccttgtttgtcaccctaatctttgtactgtaccgggacacaccagtggtcaaatcctccagtcgggagctctgctacatcatcctagctggcatcttccttggttatgtgtgcccattcactctcattgccaaacctactaccacctcctgctacctccagcgcctcttggttggcctctcctctgcgatgtgctactctgctttagtgactaaaaccaatcgtattgcacgcatcctggctggcagcaagaagaagatctgcacccggaagcccaggttcatgagtgcctgggctcaggtgatcattgcctcaattctgattagtgtgcaactaaccctggtggtaaccctgatcatcatggaaccccctatgcccattctgtcctacccaagtatcaaggaagtctaccttatctgcaataccagcaacctgggtgtggtggcccctttgggctacaatggactcctcatcatgagctgtacctactatgccttcaagacccgcaacgtgcccgccaacttcaacgaggccaaatatatcgcgttcaccatgtacaccacctgtatcatctggctagcttttgtgcccatttactttgggagcaactacaagatcatcacaacttgctttgcagtgagtctcagtgtaacagtggctctggggtgcatgttcactcccaagatgtacatcattattgccaagcctgagaggaatgtccgcagtgccttcaccacctctgatgttgtccgcatgcatgttggcgatggcaagctgccctgccgctccaacactttcctcaacatcttccgaagaaagaaggcaggggcagggaatgccaattctaatggcaagtctgtgtcatggtctgaaccaggtggaggacaggtgcccaagggacagcatatgtggcaccgcctctctgtgcacgtgaagaccaatgagacggcctgcaaccaaacagccgtcatcaaacccctcactaaaagttaccaaggctctggcaagagcctgaccttttcagataccagcaccaagaccctttacaacgtagaggaggaggaggatgcccagccgattcgctttagcccgcctggtagcccttccatggtggtgcacaggcgcgtgccaagcgcggcgaccactccgcctctgccgccccacctgaccgcagaggagacccccctcttcctggccgaaccagccctccccaagggcttgccccctcctctccagcagcagcagcaaccccctccacagcagaaatcgctgatggaccagctccagggagtggtcagcaacttcagtaccgcgatcccggattttcacgcggtgctggcaggccccgggggtcccgggaacgggctgcggtccctgtacccgcccccgccaccgccgcagcacctgcagatgctgccgctgcagctgagcacctttggggaggagctggtctccccgcccgcggacgacgacgacgacagcgagaggtttaagctcctccaggagtacgtgtatgagcacgagcgggaagggaacacggaagaagacgaactggaagaggaggaggaggacctgcaggcggccagcaaactgaccccggatgattcgcctgcgctgacgcctccgtcgcctttccgcgactcggtggcctcgggcagctcggtgcccagctccccagtgtccgagtcggtgctctgcacccctcccaacgtatcctacgcctctgtcattctgcgggactacaagcaaagctcttccaccctgtaagggggaagggtccacatagaaaagcaagacaagccagagatctcccacacctccagagatgtgcaaacagctgggaggaaaagcctgggagtggggggcctcgtcgggaggacaggagaccgctgctgctgctgccgctactgctgctgctgccttaagtaggaagagagggaaggacaccaagcaaaaaatgttcaggccaggattcggattcttgaattactcgaagccttctctgggaagaaagggaattctgacaaagcacaattccatatggtatgtaacttttatcacaaatcaaatagtgacatcacaaacataatgtcctcttttgcacaattgtgcatagatatatatatgcccacacacactgggccatgcttggcaaggaacagaccacgtggcatccagtcggatcatgagttcacctgatgcattcggagtgagctggtggagccagacagagcaggtgcggggaagggaagggccaggccagacccatcccaaacggatgatgggatgatgggacagcagttccttgctcagaagcccttctccccgctgggctgacagactcctcatcttcaggagactcaggaatggagcggtacaggggtctctcttcatccaccgcaacccatccagtgccagctttgagattgcacttgaagaaaggtgcatggaccccctgctgctctgcagattccctttatttaggaaaacaggaataagagcaaaattatcaccaaaaagtgcttcatcaggcgtgctacaggaggaaggagctagaaatagaacaatccatcagcatgagactttgaaaaaaaaaacacatgatcagcttctcatgttccatattcacttattggcgatttggggaaaaggccggaacaagagattgttacgagagtggcagaaacccttttgtagattgacttgtgtttgtgccaagcgggctttccattgaccttcagttaaagaacaaaccatgtgacaaaattgttaccttccacttactgtagcaaataatacctacaagttgaacttctaagatgcgtatatgtacaatttggtgccattatttctcctacgtattagagaaacaaatccatctttgaatctaatggtgtactcatagcaactattactggtttaaatgacaaataattctatcctattgtcactgaagtccttgtaactagcgagtgaatgtgttcctgtgtccttgtatatgtgcgatcgtaaaatttgtgcaatgtaatgtcaaattgacctgtcaatgtcaacctagtagtcaatctaactgcaattagaaattgtcttttgaatatactatatatattttttatgttccaataatgttttatacatcattgtcatcaatatctacagaagctctttgacggtttgaatactatggctcaaggttttcatatgcagctcggatggacatttttcttctaagatggaacttatttttcagatattttctgatgtggagatatgttattaatgaagtggtttgaaaatttgttatattaaaagtgcacaaaaactgagagtgaaaataaaaggtacattttataagcttgcacacattattaacacataagattgaacaaagcatttagattattccaggttatatcatttttttaaagattttccacagctacttgagtgtctaacatacagtaacatctaactcagctaataatttgtaaaatctttatcaatcacattgtggcctcttttaatttttatgttcatggacttttattcctgtgtcttggctgtcataactttttatttctgctatttgctgttgtgtaatatccatggacatgtaatccacttactccatctttacaatccctttttaccaccaataaaaggattttttcttgctgttttgatttcttctattatttgtggaatgaattataccccccttaaatatctttgtttatgccttatgttcagtcatattttaatatgcttccttcatattgaagctgctgatttctcagccaaaaatcatcttagaatctttaaatatccattgcatcatttgttcagaatttaacatccattccaatgttggaggcttgtattacttatatttcatcatattctattgccaagtttagtcagttccacaccaagaatgaactgcatttcctttaaaaattattttaaaacacctttattgaaaagatctcatgactgagatgtggactttggttccatgttttcattgtaagaaagcagagagcggaaaatcaatggctccagtgattaatagatgggtttttagtaattgacaaattcatgagggaaagcatatgatctctttattagtgaatcatgcttattttttactcttaacgccactaatatacatccctaatatcacagggcttgtgcattcagatttttaaaaaattaggatagataaggaaacaacttatattcaagtgtaagatgatatcaggttggtctaagacttttggtgaacacgttcattcaactgtgatcactttattactctgaatgcctactattatcctgattatggggtctcctgaataaatagagtattagtctttatgtcatcattgttcaaaattggagatgtacacatacataccctataccaagagggccgaaactcttcaccttgatgtatgttctgatacaagttgttcagcttcttgtaaatgtgttttccttcggcttgttactgccttttgtcaaataatcttgacaatgctgtataataaatattttctatttatt

SEQ ID NO: 162 - DNA, 6633 bp, Homo sapiens
cggcgccgcgcggccgcgctagaatggaggcgcccagcggcagcgagcccggcggcgacggggccggggactgcgcccacccggacccccgggcccctggcgccgcggcgcccagctccggccccggcccgtgcgcggccgcccgggagtccgagcgccagctgcgcctccgcctctgcgtcctcaacgagatcttgggcaccgagagggactacgtgggcaccttgcgcttcttgcagtcggcattcctgcatcgcatccggcagaacgtggccgactcagtggagaagggcctcacggaggagaatgtcaaggtcctgttctcgaacatcgaagacatcctggaagttcataaggatttcttggccgccttggagtattgtttacacccggagccgcagtctcagcatgaacttgggaatgttttcttaaaattcaaggacaagttctgcgtgtacgaggagtattgcagcaaccatgagaaagccctgaggctgctggtggagctgaacaagatccctaccgtgcgcgccttccttttgagctgcatgcttctgggaggccggaagaccacggacatccctttggaaggctacctgttgtctccgatccagaggatctgcaagtacccgctcctccttaaggagctggccaagaggactcccggcaagcacccagaccaccccgcggtccagagtgccctgcaggccatgaagaccgtttgctccaacatcaatgagaccaagcggcagatggagaagctggaagccctggagcagctgcagtcccacatcgaaggctgggagggttccaacctcacagacatctgcactcagctcctcctgcaagggactttgttaaagatctctgcgggcaacatccaggaaagggccttcttcctcttcgacaaccttctcgtctactgcaagcggaaatccagggtcaccgggagcaagaagtccaccaagaggaccaaatccatcaacggctccctctacatcttcaggggtcgaatcaacactgaagtcatggaggtggagaatgtggaagatgggacagcggattaccatagcaacggctataccgtcaccaacggctggaagatccacaacacggccaagaataagtggtttgtctgcatggccaagacggcagaggagaagcagaagtggctggatgccatcatccgcgagcgggagcagcgcgagagcctgaagctgggcatggagcgtgatgcctacgtcatgattgcggagaagggggagaagctgtaccacatgatgatgaacaagaaggtgaacctcatcaaggaccgccggagaaagctgagcactgtccccaagtgctttcttggcaatgagttcgttgcctggctcctagaaattggtgaaatcagcaagacggaagaaggagtcaacttgggccaagccctgttggagaatggcatcatccaccatgtttccgacaagcaccagttcaagaatgagcaggtgatgtatcgcttccgctacgacgatggcacctacaaggcccgaagtgagctggaggacatcatgtccaagggtgtgaggctttactgccgtcttcacagcctctacaccccggtgatcaaagaccgtgattaccacctgaagacctacaagtcagtgcttcccgggagcaagctggtggactggctgctggctcagggagactgccagactcgggaggaggcagtggcgctcggcgtgggtctgtgcaacaatggcttcatgcaccacgtgctggagaagagcgagttcagggatgagtcccagtacttccgctttcatgctgacgaggagatggaggggaccagcagcaagaacaaacagcttcgcaacgacttcaagctggtggagaacattctggccaagcgcctgctgatcctgccccaggaggaggactatggctttgacatcgaggagaagaacaaggctgtggtggtgaagtccgtccagaggggctcgctggctgaggtggctggcctgcaggtggggaggaagatctactccatcaatgaggacctggtgttcctgcggccgttttcagaggtggagtccatcctcaaccagtccttctgctcccgccgccctctgcgcctcctggtggccacgaaggccaaagagatcatcaaaatccccgaccagccggacacactgtgcttccagattcgtggagctgccccaccgtacgtctatgctgtggggagaggctctgaggccatggctgcagggctctgtgctggtcagtgcattctgaaggtcaatggcagcaacgtgatgaacgatggtgcccctgaggtcctggagcacttccaggcattccggagtcggcgcgaagaggccctgggcctgtaccagtggatctaccacacccatgaggatgcccaggaagcacgagccagtcaggaggcctccactgaggaccccagtggcgagcaggcccaggaggaagaccaggctgattcagccttcccactgctgtccctgggtccccggctgagcctgtgtgaggacagccccatggtcaccctgactgtggacaacgtgcacctggaacacggcgtggtgtatgagtatgtgagcacggcaggcgtcaggtgccatgtgctggagaagatcgtggagccccgcggctgcttcggcctcaccgccaagatcctcgaggcctttgctgccaatgacagcgtcttcgtggagaactgcaggcggctcatggccctgagcagcgccatcgtgaccatgccccactttgagttccgcaacatctgtgacaccaagctggagagcattggccagaggattgcctgctaccaggagtttgcagcccaactgaagagcagggtcagcccacccttcaaacaagcccccctggagccccacccgctgtgtggcctggacttctgccccaccaattgccacatcaacctcatggaagtgtcctaccccaagaccaccccctcagtgggcaggtccttcagcatccgctttggacgcaaaccctccctcatcggccttgacccggagcaaggccacctgaaccccatgtcgtacacccagcactgcatcaccaccatggctgctccctcctggaagtgcttgcctgctgcagagggtgatccccaaggccagggtctccatgatggcagcttcgggccagccagtgggacccttggtcaggaagaccggggcctcagcttcctactcaagcaggaggaccgtgagatccaggatgcctacctgcagctcttcaccaagctggatgtggccctgaaggagatgaagcaatatgtcacccagatcaacaggctgctgtccaccatcacagagcccacctcgggtgggtcctgcgacgcatccttggctgaggaggcctcctccctgcccctggtcagtgaagagagcgagatggacaggagtgaccatgggggcatcaagaaggtgtgcttcaaggtggccgaggaggaccaggaggactcaggccacgacaccatgagttatcgcgactcctacagcgagtgtaacagcaatcgagactcggtcctgtcctacaccagcgtgagaagtaacagctcctacttgggcagcgacgagatggggtctggagatgagctgccctgtgacatgcggatcccatctgacaagcaggacaagcttcatggctgcctggagcacctctttaaccaggtggactccatcaatgctctcctcaaggggccagtcatgagccgggctttcgaagagaccaagcatttccctatgaaccacagcttacaagagtttaaacagaaagaagagtgtacaatccgtggccggagcctgatccagattagcatccaggaggacccctggaacctccccaactccatcaagaccctggtggacaacattcagagatatgtggaagatgggaagaaccagctgctcctggccttgctgaagtgcacagacacggagctgcagctgcgcagagacgcgatcttctgccaggccctggtggccgccgtgtgcaccttctccgagcagctgctggcggccctgggctaccgctacaacaacaatggcgagtacgaggagagcagccgcgacgccagccgcaagtggctggagcaggtggcggccacgggcgtcctgctgcactgccagtccctgctctcgccagccacagtgaaggaggaacggaccatgctggaggacatctgggtgacgctgtcagagctggacaatgtcaccttctcctttaagcagctggacgagaactatgtggccaacaccaacgtcttctaccacattgagggcagccggcaggcgctgaaggtcatcttctacctcgacagctaccacttctccaagctgccctcccgcctggagggtggggccagcctgaggctgcacacagcgctgttcacgaaagtgctggagaacgtggaggggctgccttctccaggcagccaggccgcggaggatttgcagcaggacatcaacgcgcagtccctggagaaagttcagcagtattaccgcaaactcagggcattttacctggagcggtctaacctgcccacggatgccagcaccacggcggtaaagatagaccagctgatccgccccatcaatgccctggatgagctctgccgcctcatgaagtcctttgtccacccaaagcctggtgctgctgggagtgtgggcgccggcctcatccccatctcctcggagctctgctaccgcctgggggcctgccagatggtcatgtgtggcacaggcatgcagaggagcaccctgagcgtgtccctggagcaggcggccatcttggcacggagccacgggttgctgcccaagtgcatcatgcaggccacggacatcatgcggaagcagggcccaagggtggagattctggccaaaaacctgcgagtcaaggaccagatgccccagggtgctccgcgcctctaccgcctctgccagccgccggtggatggggacctctgaacacccaaatgccccacgctgggccgcggcctctggagctgggatttgggaggacacagcaggcagcgctggccttctccagggatggcccaaggcttccgcagccgcccgttccgggacctgcccagcgtcctccctgcctccttccgggacaagcctggccaccctcgctgtgatgacgagctggctgattggccctgggccggcccattcttcacacgcctgccagaagctggaggggtgctggagacccatagagctgatgggagcagctggtgcctggccttcggctcctgcgtccccagaacccaagggaacgtcatggaggccacatggggccacccggctccctcgggatggctccgcctgcacttttgaaaccccggtttccttcaacgtccacattccaggtgaccacacgtgtctcctcctcctcatcttagcttccaggttcaccctaaccctgtactaacctgcttggtggacttggaaaagacttggctctgtcgggaaaggagagacggggcctccatcacgcctgttaccagaggatccccgagagccacaccagctctggacatcaccgcccctggaactggggccaccagccctgggcacgagatttgctctgactttatttatatggcatgaaatctctggtttattttgggattttttgttgttggtgttgtcaaagtttgttttttctaaagttgtgtgattatatatttgacattttacatttcaaagaaaggtatgttgtctaacaggggaccaacagaaggtagtattgacaactgttcctgcttctactaaaaaaaaaagagcacaaaagaaaaactaaattattgaaaaattaaaaaatgtcattgtttcctgtttgttaatattagggttgtaaggtgtcgttttgaggtatcgactgtgattccttcccccaccctccattctccagcggttggccggtgttagaactcgctctctttgagtgactggctacaagggcctgagaggtggccagccagggttggagctggaggggatggagccccacctgaggtgccgtgtcacacgggttagagggtcactgggaaacaccgggcggtggcttctgtgatttattttcttgatggtaacttctcagagcagggcgattgggacatcaccagccagagcacaggaagccaccctgcctgctggggaggagggacccacacaagccccctcggcagtttgtccccccagcttcggtatgccttcagggaaaggtcacagctggggaggaagcggggggacgcctgtcacccctggcaggtggtgagttcaggtgggggctccctgctgcccccaggcctgggagcttgaagccctcccggcatctggcatccgagcctcccgccctccagggtgcgcttccctctcttgccgcagcatacacgagggcaggcagtggccttgtcactgtatcttgcatcagagacaaaggaggacccgctttagccctgctgcgggaaatgggggagggcccagggccagcgcattgtgcactggtttactttaaaatgtacagattcttctcgttaaattcttgatagattttttattattattaaaagtcagtttataatac

SEQ ID NO: 163 - DNA, 3808 bp, Homo sapiens
accatctactccacagtcagcacatccacaactgccatcacctcacattttactacctcagagactgcggtgactcccacacctgtaaccccatcttctctgagtacagacatcccgaccacaagcctacgaactctcaccccttcgtctgtgggcaccagcacttcattgactacaaccacagactttccctctatacccactgatatcagtaccttaccaactcgaacacacatcatttcatcttctccctccatccaaagtacagaaacctcatcccttgtgggcaccacctctcccaccatgtccactgtgagaatgaccctcagaattactgagaacaccccaatcagttcctttagcacaagtattgttgttatacctgaaaccccaacacagacccctcctgtactgacgtcagccactgggacccaaacatctcctgcacctactactgtcacctttggaagtacggattcctccacgtccactcttcatactcttactccatcaacagccttgagcacgatcgtgtcaacatcacaggttcctattcctagcacacattcctccacccttcaaacaactccttctactccctcattgcaaacttcactcacatctacaagtgagttcactacagaatctttcactaggggaagtacgtctacaaatgcaatcttgacttcttttagtaccatcatctggtcctcaacacccactattatcatgtcctcttctccatcttctgccagcataactccagtgttctccactaccattcattctgttccttcttcaccatacattttcagtacagaaaatgtgggctccgcttctatcacaggctttcctagtctctcttcctctgcaactaccagcacttcttcaaccagctcctctctgaccacagctctcactgaaataacccccttttcttatatttcccttccctccaccacaccctgtccaggaactataacaattaccatagtccctgcctctcccactgatccatgtgttgaaatggatcccagcactgaagctacttctcctcccaccaccccattaacagtctttccctttactaccgaaatggtcacctgtcctacctccatcagtatccaaactactcttactacatatatggacacttcttccatgatgccagaaagtgagtccagcatctcacccaatgcttccagttccactggcactgggactgtacccacaaacacagttttcacaagtactcgactgcccaccagtgagacctggctgagcaacagttctgtgatccccctacctcttcctggcgtctctaccatcccgctcaccatgaaaccaagcagtagcctcccgaccatcctgaggacttcaagcaagtcaacacacccctccccacccaccactaggacttcagagacaccagtggccactacccagactcctaccacccttacatcacgcaggacaactcgcatcacttctcagatgaccacacagtccacgttgaccaccactgcaggcacctgtgacaatggtggcacctgggaacagggccagtgtgcttgccttccggggttttctggggaccgctgtcagctccagaccagatgccagaatgggggtcagtgggatggcctcaaatgccagtgccccagcaccttctatggttccagttgtgagtttgctgtggaacaggtggatctagatgtagtggagaccgaggtgggcatggaagtgtctgtggatcagcagttctcgccggacctcaatgacaacacttcccaggcctacagggatttcaacaagaccttctggaatcagatgcagaagatttttgcagacatgcagggcttcaccttcaagggtgtggagatcctgtccctgaggaatggcagcatcgtggtggactacctggtcctgctggagatgcccttcagcccccagctggagagcgagtatgagcaggtgaagaccacgctgaaggaggggctgcagaacgccagccaggatgtgaacagctgccaggactcccagaccctgtgttttaagcctgactccatcaaggtgaacaacaacagcaagacagagctgaccccggcagccatctgccgccgcgccgctcccacgggctatgaagagttctacttccccttggtggaggccacccggctccgctgtgtcaccaaatgcacgtctggggtggacaacgccatcgactgtcaccagggccagtgcgttctggagacgagcggtcccacgtgtcgctgctactccaccgacacgcactggttctctggcccgcgctgcgaggtggccgtccactggagggcgctggtcgggggcctgacggccggcgccgcgctgctggtgctgctgctgctggcgctgggcgtccgggcggtgcgctccggatggtggggcggccagcgccgaggccggtcctgggaccaggacaggaaatggttcgagacctgggatgaggaagtcgtgggcactttttcaaactggggtttcgaggacgacggaacagacaaggatacaaatttctatgtggccttggagaacgtggacaccactatgaaggtgcacatcaagagacccgagatgacctcgtcctcagtgtgagccctgcggggccccttcaccaccccctccgccctgccccggatacaagggtctgcattgcgtccatttcgagaggtggccccaggacgcgggcagcccaggctcctgctgttcttgggcaagatgagactgttcccccaaatcccatccttctccttccaacttggctgaaacccacctggagacgcagttcacgtccaggctcttccactgtggaatcttgggcaagacagtaacgagcctcagtttcctcacctgcaaaacgggtacagcattcctgtatgatagctcacgccgttgttgtgaaaaccacatagacttggtcaattctcggtcctaccctgccctcccgtctcagccctcgtgttgccattgcctctctcggatcctccaatcctcacgtccttcacctggtctctggccctggttcttattttctctcaattccctactgcctgtttcttactctgaacctggaggcaacctgcagccccatcccatctcctgccctctcctgatctaactccctgctgcatctcttgctctcattccttagacgtcctccccttttgaccccgttccttcatccatcctgcaccccagtcccccagccctaaatcctccctcctctcctcacatcctggtccctagcaaggtatagatagcctctgtgtcttaggataccccgggtgctgttccctcggtcaccctgttgcccagttccccgtttctcttgctctcattccttgtatcctttccccttttgagcccgtccattcatcggttctgcccccgactcccccagccctaaataccccagctgctgttccccccatcaccctgctgcccaattctttattctccacccctttctctcacccctggagccctgcgggtgggggcagggcatgagttccccagtccccaaggaaaggcagccccctcagtctccctcctcctcattcccttccatctccctcccctctgccttttaaacccatcccctccgattcccctcctcccccctctctccctggtgtcacctggattcctgcagtaattctgagcccttgaaatcctcagtcgccttggcggggaagattggctttggggacaggaagtcggcacatctccaggtcttcatgtgcacaatatagagtttattgtaaaaagc

SEQ ID NO: 164 - DNA, 6901 bp, Homo sapiens
ccaaaaataaaaccgtccgggtccccttcagacggctgcaggcacagggaggaggcgcgaaggtgcagcagccgtgcgagcccagctggagtaggagcgcggactcgaggctcggggcgcgcagccctcgttccgccgagagccgggcccccagtcggccgcttcagggccccctagactcagagaagctggccgccgggcggggccgggagaacagcccgcgggcgtccagcgtgccgaccacaaagctcttcgcggtgcccgcgcgcaccactctccagccgccccgcgccatgaggccgcggaccaaagcccgcagcccggggcgcgccctgcggaacccctggagaggcttcctgccgctcaccctggctctcttcgtgggcgcgggtcatgcccaaagggaccccgtagggagatacgagccggctggtggagacgcgaatcgactgcggcgccctgggggcagctacccggcagcggctgcagccaaggtgtacagtctgttccgggagcaggacgcgcctgtcgcgggcttgcagcccgtggagcgggcccagccgggctgggggagccccaggaggcccaccgaggcggaggccaggaggccgtcccgcgcgcagcagtcgcggcgtgtccagccacctgcgcagacccggagaagcactcccctgggccagcagcaaccagcaccccggacccgggccgcgccggctctcccacgcctggggaccccacagcggtctggggctgcgcccccaaccccgccgcgagggcgactcacggggaggaacgtctgcgggggacagtgctgcccaggatggacaacagcaaacagcaccaaccactgtatcaaacccgtttgcgagccgccgtgccagaaccggggctcctgcagccgcccgcagctctgtgtctgccgctctggtttccgtggagcccgctgcgaggaggtcattcccgatgaggaatttgacccccagaactccaggctggcacctcgacgctgggccgagcgttcacccaacctgcgcaggagcagtgcggctggagagggcaccttggccagagcacagccgccagcaccacagtcgccgcccgcaccacagtcgccaccagctgggaccctgagtggcctcagccagacccacccttcccagcagcacgtggggttgtcccgcactgtccgacttcacccgactgccacggccagtagccagctctcttccaacgccctgcccccgggaccaggccttgagcagagagatggcacccaacaggcggtacctctggagcacccctcatccccctgggggctgaacctcacggagaaaatcaagaagatcaagatcgtcttcactcccaccatctgcaagcagacctgtgcccgtggacactgtgccaacagctgtgagaggggcgacaccaccaccctgtacagccagggcggccatgggcacgatcccaagtctggcttccgcatctatttctgccagatcccctgcctgaacggaggccgctgcatcggcagggacgaatgctggtgccccgccaactccaccgggaagttctgccacctgcctatcccgcagccggacagggagcctccagggagggggtcccgccccagggccttgctggaagccccactgaagcagtccactttcacactgccgctctccaaccagctggcctccgtgaacccctccctggtgaaggtgcacattcaccacccacccgaggcctcagtgcagatccaccaggtggcccaggtgcggggcggggtggaggaggccctagtggagaacagcgtggagaccagacccccgccctggctgcctgccagccctggccacagcctctgggacagcaacaacatccctgctcggtctggagagccccctcggccactgcccccagcagcacccaggcctcgaggactgctgggccggtgttacctgaacactgtgaacggacagtgtgccaaccctctgctggagctgactacccaggaggactgctgtggcagtgtgggagccttctggggggtgactttgtgtgccccatgcccacccagaccagcctccccggtgattgagaatggccagctggagtgtcctcaggggtacaagagactgaacctcactcactgccaagatatcaacgagtgcttgaccctgggcctgtgcaaggacgcggagtgtgtgaataccaggggcagctacctgtgcacatgcagacctggcctcatgctggatccatcgcggagccgctgtgtgtcggacaaggcaatctccatgctgcagggactgtgctaccggtcgctggggcccggcacctgcaccctgcctttggcccagcggatcaccaagcagatatgctgctgcagccgcgtgggcaaagcatggggcagcgagtgtgagaaatgccctctgcctggcacagaggccttcagagagatctgccctgccggccacggctacacctacgcgagctccgacatccgcctgtccatgaggaaagccgaggaggaggaactggcaaggcccccaagggagcaagggcagaggagcagcggggcactgcccgggccagcagagaggcagcccctccgggtcgtcacggacacctggcttgaggccgggaccatccctgacaagggtgactctcaggctggccaggtcacgaccagtgtcactcatgcacctgcctgggtcacagggaatgccacaaccccaccaatgcctgaacaggggattgcagagatacaggaagaacaagtgaccccctccaccgatgtgctggtgaccctgagcaccccaggcattgacagatgcgctgctggagccaccaacgtctgtggccctggaacctgcgtgaacctccccgatggatacagatgtgtctgcagccctggctaccagctgcaccccagccaggcctactgcacagatgacaacgagtgtctgagggacccctgcaagggaaaagggcgctgcatcaaccgcgtggggtcctactcctgcttctgctaccctggctacactctggccacctcaggggcgacacaggagtgtcaagatatcaatgagtgtgagcagccaggggtgtgcagcggggggcagtgcaccaacaccgagggctcgtaccactgcgagtgtgatcagggctacatcatggtcaggaaaggacactgccaagatatcaacgaatgccgtcaccccggtacctgccctgatgggagatgcgtcaattcccctggctcctacacttgtctggcctgtgaggagggctaccggggccagagtgggagctgtgtagatgtgaatgagtgtctgactcccggggtctgtgcccatggaaagtgcaccaacctagaaggctccttcagatgctcttgtgagcagggctatgaggtcacctcagatgagaagggctgccaagatgtggatgagtgtgccagccgggcctcatgccccacaggcctctgcctcaacacggagggctccttcgcctgctctgcctgtgagaacgggtactgggtgaatgaagacggcactgcctgtgaagacctagatgagtgtgccttcccgggagtctgcccctccggagtctgcaccaacacggctggctccttctcctgcaaggactgcgatgggggctaccggcccagccccctgggtgactcctgtgaagatgtggatgaatgtgaagacccccagagcagctgcctgggaggcgagtgcaagaacactgtgggctcctaccagtgcctctgtccccagggcttccagctggccaatggcaccgtgtgtgaggatgtgaatgagtgcatgggggaggagcactgcgcaccacacggcgagtgcctcaacagccacgggtctttcttctgtctgtgcgcgcctggcttcgtcagcgcagaggggggcaccagctgccaggatgtggacgagtgtgccaccacagacccgtgtgtgggagggcactgtgtcaacaccgagggctccttcaactgtctatgtgagactggcttccagccctccccagagagtggagagtgtgtggatattgacgagtgtgaggactatggagacccggtgtgtggcacctggaagtgtgaaaacagccctggctcctaccgctgtgttctgggctgccagcctggcttccacatggccccgaacggagactgcattgacatagacgagtgcgccaacgacaccatgtgtggcagccacggcttctgtgacaacactgatggctccttccgctgcctctgtgaccagggcttcgagatctctccctcaggctgggactgtgtggatgtgaacgagtgtgagcttatgctggcggtatgtggggccgcgctctgtgagaacgtggagggctccttcctgtgcctctgtgccagtgacctggaggagtacgatgcccaggaggggcactgccgcccacggggggctggaggtcagagtatgtctgaggccccaacgggggaccatgccccggcccccacccgcatggactgctactccgggcagaagggccatgcgccctgctccagtgtcctgggccggaacaccacacaggctgaatgctgctgcacccagggcgctagctggggagatgcctgtgacctctgcccgtctgaggactcagctgaattcagcgagatctgccctagtggaaaaggctacattcctgtggaaggagcctggacgtttggacagaccatgtacacagatgcggatgagtgtgtgatattcgggcctggtctctgcccgaacggccggtgcctcaacaccgtgcctggttatgtctgcctgtgcaatcccggcttccactacgatgcttcccacaagaagtgtgaggatcacgatgagtgccaggacctggcctgtgagaatggcgagtgcgtcaacacggagggctccttccactgcttctgcagccccccgctcaccctggacctcagccagcagcgctgcatgaacagcaccagcagcacggaggacctccctgaccacgacatccacatggacatctgctggaaaaaagtcaccaatgatgtgtgcagcgaacccctgcgtgggcaccgcaccacctacacggaatgctgctgccaggacggcgaggcctggagccagcagtgtgctctgtgtcccccgaggagctctgaggtctatgctcagctgtgcaacgtggctcgcattgaggcagagcgggaggccggggtccacttccggccaggctatgagtatggccccgggcccgatgacctgcactacagcatctatggcccagatggggcccccttctacaactacctgggccccgaggacaccgtccctgatcctgccttccccaacacagccggtcactcagcggaccgcacacccatccttgagtctcctttgcagccctcagaactccagccccactacgtggccagccatccagagcccccagccggcttcgaagggcttcaggcggaggagtgcggcatcctgaacggctgtgagaatggccgctgtgtgcgcgtgcgggagggctacacctgtgactgttttgagggcttccagctggatgcggcccacatggcctgcgtagatgtgaatgagtgtgatgacttgaacgggcctgctgtgctctgtgtccatggttactgcgagaacacagagggctcctaccgctgccactgctccccgggatatgtggctgaggcagggcccccccactgcactgccaaggagtagcagtcaggggtcagtgtggcaactacctggaaatggcctccagtcacaggcaggggccttgaggatgatttcctagctgggaagacaccgtgacatcaggccagaggtttccaatcagccttgcctgctttcatctctcccagcttagcctctggctgtaagcttcggtcattgcctccatgcccttgcttggctcaagcaccaccaatcgctttaatgcttcagccaccgcatgaggccctgtccaccacctttcctggccttgctatgggatgcttaccaaaggatggccctcatccaccctcccaagctgtgcgagcatgcaaggccccatggcctcacactgcagacacccctttccagccacaatccaccatcatcctgacgatcccacaactgggacagaggctacatctgccctagggaggtccttcagaatctgtggagcaagaaaggatttggggaagcttggggactgactccagagccccctcctaagaaccatcaccaccactcagccaatctgttctgggccctgattttgccacacctccatcctgtagcccattctctgaccccaaggagtggcagaagatcccttcactcagagaagcaaggctgatattagcttgttgaatgtaagagacacaaatgaagaagaacaaagagcctgagaaagcagcaagaggacatgatgaaaaatacgtggagttgatgagaaaggggagccaaggctttatacgtctaaagaaaatattcagtagctgaatccgcccagtgatagcctgtgggcaccagcagcaagggctgccatgggatacagcacccatctacaaagacctctattacataaacactgcttcttacaggaaacaaacctcttctgggatctccttttgtgaaaaccagtttgatgtgctaaaagtaaaagtctattttccagtgtggtcttgttcagaagcagccagatttccaatgttgtttttcccctccactcagaaacccctgccctttcccttcagaaaacgatggcaggcattcctctgagtttacaagcagagactcactccaacccaaactagctgggagttcagaaccatggtggaataaagaaatgtgcatctagaaaaaaaaaaaaaaaa

SEQ ID NO: 165 - DNA, 1584 bp, Homo sapiens
cgctaagcgtcccagccgcatccctcccgcagcgacggcggcccgggacccgcgggctgtgaaccatgaacacccgcaatagagtggtgaactccgggctcggcgcctcccctgcctcccgcccgacccgggatccccaggacccttctgggcggcaaggggagctgagccccgtggaagaccagagagagggtttggaggcagcccctaagggcccttcgcgggagagcgtcgtgcacgcgggccagaggcgcacaagtgcatacaccttgatagcaccaaatataaaccggagaaatgagatacaaagaattgcggagcaggagctggccaacctggagaagtggaaggagcagaacagagctaaaccggttcacctggtgcccagacggctaggtggaagccagtcagaaactgaagtcagacagaaacaacaactccagctgatgcaatctaaatacaagcaaaagctaaaaagagaagaatctgtaagaatcaagaaggaagctgaagaagctgaactccaaaaaatgaaggcaattcagagagagaagagcaataaactggaggagaaaaaaagacttcaagaaaaccttagaagagaagcatttagagagcatcagcaatacaaaaccgctgagttcttgagcaaactgaacacagaatcgccagacagaagtgcctgtcaaagtgctgtttgtggcccacaatcctcaacatggaaacttcctatcctgcctagggatcacagctgggccagaagctgggcttacagagattctctaaaggcagaagaaaacagaaaattgcaaaagatgaaggatgaacaacatcaaaagagtgaattactggaactgaaacggcagcagcaagagcaagaaagagccaaaatccaccagactgaacacaggagggtaaataatgcttttctggaccgactccaaggcaaaagtcaaccaggtggcctcgagcaatctggaggctgttggaatatgaatagcggtaacagctggggttctctattagttttttcgaggcacctaagggtatatgagaaaatattgactcctatctggccttcatcaactgacctcgaaaagcctcatgagatgctttttcttaatgtgattttgttcagcctcactgtttttaccttaatttcaactgcccacacacttgaccgtgcagtcaggagtgactggcttctccttgtcctcatttatgcatgtttggaggagctgattcctgaactcatatttaatctctactgccagggaaatgctacattatttttctaattggaagtataattagagtgatgttggtagggtagaaaaagagggagtcacttgatgctttcaggttaatcagagctatgggtgctacaggcttgtctttctaagtgacatattcttatctaattctcagatcaggttttgaaaagctttgggggtctttttagattttaatccctactttctttatggtacaaatatgtacaaaagaaaaaggtcttatattcttttacacaaatttataaataaattttgaactccttctgtaaaaaaaaaaaaaaaaaaaaaa

SEQ ID NO: 166 - DNA, 1370 bp, Homo sapiens
aggtgacctccagcccgggcgcccggttcagcgccgccccggccggcgccggtgcctgccaggcactcagggaggcgggggcgcagtggaggaggcggcgccatcgcgaagcgagcgcctcgcccgcactcagccttgccaccccgcccgcagtccaggctggactgggcggcatttgccgaggctcctcggccaggccccgtccgcccgagccgcgctgagacccgggcagcggccgcgtggagaggaggtggcagcggcccgggaggccggagccaagccagcgacccaccatggagacccgctacaacctgaagagtccggctgttaaacgtttaatgaaagaagcggcagaattgaaagatccaacagatcattaccatgcgcagcctttagaggataacctttttgaatggcacttcacggttagagggcccccagactccgattttgatggaggagtttatcacgggcggatagtactgccaccagagtatcccatgaaaccaccaagcattattctcctaacggctaatggtcgatttgaagtgggcaagaaaatctgtttgagcatctcaggccatcatcctgaaacttggcagccttcgtggagtataaggacagcattattagccatcattgggtttatgccaacaaaaggagagggagccataggttctctagattacactcctgaggaaagaagagcacttgccaaaaaatcacaagatttctgttgtgaaggatgtggctctgccatgaaggatgtcctgttgcctttaaaatctggaagcgattcaagccaagctgaccaagaagccaaagaactggctaggcaaataagctttaaggcagaagtcaattcatctggaaagactatctctgagtcagacttaaaccactctttttcactaactgatttacaagatgatatacctacaacattccagggtgctacggccagtacatcgtacggagtccagaattcctcagcagcatcctttcatcaacctacccaacctgtagctaagaatacctccatgagccctcgacagcgccgggcccagcagcagagtcagagaaggttgtctacttcaccagatgtaatccagggccaccagccaagagacaaccacactgatcatggtgggtcagctgtactgattgtcatcctgactttggcattggcagctcttatattccgacgaatatatctggcaaacgaatacatatttgactttgagttataatatggttttgtgacttatgagctgtgactcaactgcttcattaaacattctgcattgggtataatctaaaaaaaaaaaaaaaaaaaaaaaaaaaaaaaaaaaaaaaaaaaaaaaaaaaaa

SEQ ID NO: 167 - DNA, 2076 bp, Homo sapiens
agttgttacatgaaatctgcagtttcataatttccgtgggtcgggccgggcgggccaggcgctgggcacggtgatggccaccactggggccctgggcaactactacgtggactcgttcctgctgggcgccgacgccgcggatgagctgagcgttggccgctatgcgccggggaccctgggccagcctccccggcaggcggcgacgctggccgagcaccccgacttcagcccgtgcagcttccagtccaaggcgacggtgtttggcgcctcgtggaacccagtgcacgcggcgggcgccaacgctgtacccgctgcggtgtaccaccaccatcaccaccacccctacgtgcacccccaggcgcccgtggcggcggcggcgccggacggcaggtacatgcgctcctggctggagcccacgcccggtgcgctctccttcgcgggcttgccctccagccggccttatggcattaaacctgaaccgctgtcggccagaaggggtgactgtcccacgcttgacactcacactttgtccctgactgactatgcttgtggttctcctccagttgatagagaaaaacaacccagcgaaggcgccttctctgaaaacaatgctgagaatgagagcggcggagacaagccccccatcgatcccaataacccagcagccaactggcttcatgcgcgctccactcggaaaaagcggtgcccctatacaaaacaccagaccctggaactggagaaagagtttctgttcaacatgtacctcaccagggaccgcaggtacgaggtggctcgactgctcaacctcaccgagaggcaggtcaagatctggttccagaaccgcaggatgaaaatgaagaaaatcaacaaagaccgagcaaaagacgagtgatgccatttgggcttatttagaaaaaagggtaagctagagagaaaaagaaagaactgtccgtcccccttccgccttctcccttctctcacccccaccctagcctccaccatccccgcacaaagcggctctaaacctcaggccacatcttttccaaggcaaaccctgttcaggctggctcgtaggcctgccgctttgatggaggaggtattgtaagctttccattttctataagaaaaaggaaaagttgaggggggggcattagtgctgatagctgtgtgtgttagcttgtatatatatttttaaaaatctacctgttcctgacttaaaacaaaaggaaagaaactacctttttataatgcacaactgttgatggtaggctgtatagtttttagtctgtgtagttaatttaatttgcagtttgtgcggcagattgctctgccaagatacttgaacactgtgttttattgtggtaattatgttttgtgattcaaacttctgtgtactgggtgatgcacccattgtgattgtggaagatagaattcaatttgaactcaggttgtttatgaggggaaaaaaacagttgcatagagtatagctctgtagtggaatatgtcttctgtataactaggctgttaacctatgattgtaaagtagctgtaagaatttcccagtgaaataaaaaaaaattttaagtgttctcggggatgcatagattcatcattttctccaccttaaaaatgcgggcatttaagtctgtccattatctatatagtcctgtcttgtctattgtatatataatctatatgattaaagaaaatatgcataatcagacaagcttgaatattgtttttgcaccagacgaacagtgaggaaattcggagctatacatatgtgcagaaggttactacctagggtttatgcttaattttaattggaggaaatgaatgctgattgtaacggagttaattttattgataataaattatacactatgaaaccgccattgggctactgtagatttgtatccttgatgaatctggggtttccatcagactgaacttacactgtatattttgcaatagttacctcaaggcctactgaccaaattgttgtgttgagatgatatttaactttttgccaaataaaatatattgattcttttctaaaaaaaaaaaaaaaaaaaa

SEQ ID NO: 168 - DNA, 573 bp, Homo sapiens
atgaagtccagcggcctcttccccttcctggtgctgcttgccctgggaactctggcaccttgggctgtggaaggctctggaaagtccttcaaagctggagtctgtcctcctaagaaatctgcccagtgccttagatacaagaaacctgagtgccagagtgactggcagtgtccagggaagaagagatgttgtcctgacacttgtggcatcaaatgcctggatcctgttgacaccccaaacccaacaaggaggaagcctgggaagtgcccagtgacttatggccaatgtttgatgcttaacccccccaatttctgtgagatggatggccagtgcaagcgtgacttgaagtgttgcatgggcatgtgtgggaaatcctgcgtttcccctgtgaaagcttgattcctgccatatggaggaggctctggagtcctgctctgtgtggtccaggtcctttccaccctgagacttggctccaccactgatatcctcctttggggaaaggcaagcacacagcaggctttcaagaagtgccagttgatcgaatgtaataaataaacgagcctatttctcttt

SEQ ID NO: 169 - DNA, 4171 bp, Homo sapiens
ctggagccgctgagcccccgctgcggccgggagctgcatgggggagcgccggcagcgcttgggaagatgccccggccggagctgcccctgccggagggctgggaggaggcgcgcgacttcgacggcaaggtctactacatagaccacacgaaccgcaccaccagctggatcgacccgcgggacaggtacaccaaaccgctcacctttgctgactgcattagtgatgagttgccgctaggatgggaagaggcatatgacccacaggttggagattacttcatagaccacaacaccaaaaccactcagattgaggatcctcgagtacaatggcggcgggagcaggaacatatgctgaaggattacctggtggtggcccaggaggctctgagtgcacaaaaggagatctaccaggtgaagcagcagcgcctggagcttgcacagcaggagtaccagcaactgcatgccgtctgggagcataagctgggctcccaggtcagcttggtctctggttcatcatccagctccaagtatgaccctgagatcctgaaagctgaaattgccactgcaaaatcccgggtcaacaagctgaagagagagatggttcacctccagcacgagctgcagttcaaagagcgtggctttcagaccctgaagaaaatcgataagaaaatgtctgatgctcagggcagctacaaactggatgaagctcaggctgtcttgagagaaacaaaagccatcaaaaaggctattacctgtggggaaaaggaaaagcaagatctcattaagagccttgccatgttgaaggacggcttccgcactgacagggggtctcactcagacctgtggtccagcagcagctctctggagagttcgagtttcccgctaccgaaacagtacctggatgtgagctcccagacagacatctcgggaagcttcggcatcaacagcaacaatcagttggcagagaaggtcagattgcgccttcgatatgaagaggctaagagaaggatcgccaacctgaagatccagctggccaagcttgacagtgaggcctggcctggggtgctggactcagagagggaccggctgatccttatcaacgagaaggaggagctgctgaaggagatgcgcttcatcagcccccgcaagtggacccagggggaggtggagcagctggagatggcccggaagcggctggaaaaggacctgcaggcagcccgggacacccagagcaaggcgctgacggagaggttaaagttaaacagtaagaggaaccagcttgtgagagaactggaggaagccacccggcaggtggcaactctgcactcccagctgaaaagtctctcaagcagcatgcagtccctgtcctcaggcagcagccccggatccctcacgtccagccggggctccctggttgcatccagcctggactcctccacttcagccagcttcactgacctctactatgacccctttgagcagctggactcagagctgcagagcaaggtggagttcctgctcctggagggggccaccggcttccggccctcaggctgcatcaccaccatccacgaggatgaggtggccaagacccagaaggcagagggaggtggccgcctgcaggctctgcgttccctgtctggcaccccaaagtccatgacctccctatccccacgttcctctctctcctccccctccccaccctgttcccctctcatggctgaccccctcctggctggtgatgccttcctcaactccttggagtttgaagacccggagctgagtgccactctttgtgaactgagccttggtaacagcgcccaggaaagataccggctggaggaaccaggaacggagggcaagcagctgggccaagctgtgaatacggcccaggggtgtggcctgaaagtggcctgtgtctcagccgccgtatcggacgagtcagtggctggagacagtggtgtgtacgaggcttccgtgcagagactgggtgcttcagaagctgctgcatttgacagtgacgaatcggaagcagtgggtgcgacccgaattcagattgccctgaagtatgatgagaagaataagcaatttgcaatattaatcatccagctgagtaacctttctgctctgttgcagcaacaagaccagaaagtgaatatccgcgtggctgtccttccttgctctgaaagcacaacctgcctgttccggacccggcctctggacgcctcagacactctagtgttcaatgaggtgttctgggtatccatgtcctatccagcccttcaccagaagaccttaagagtcgatgtctgtaccaccgacaggagccatctggaagagtgcctgggaggcgcccagatcagcctggcggaggtctgccggtctggggagaggtcgactcgctggtacaaccttctcagctacaaatacttgaagaagcagagcagggagctcaagccagtgggagttatggcccctgcctcagggcctgccagcacggacgctgtgtctgctctgttggaacagacagcagtggagctggagaagaggcaggagggcaggagcagcacacagacactggaagacagctggaggtatgaggagaccagtgagaatgaggcagtagccgaggaagaggaggaggaggtggaggaggaggagggagaagaggatgttttcaccgagaaagcctcacctgatatggatgggtacccagcattaaaggtggacaaagagaccaacacggagaccccggccccatcccccacagtggtgcgacctaaggaccggagagtgggcaccccgtcccaggggccatttcttcgagggagcaccatcatccgctctaagaccttctccccaggaccccagagccagtacgtgtgccggctgaatcggagtgatagtgacagctccactctgtccaaaaagccaccttttgttcgaaactccctggagcgacgcagcgtccggatgaagcggccttcctcggtcaagtcgctgcgctccgagcgtctgatccgtacctcgctggacctggagttagacctgcaggcgacaagaacctggcacagccaactgacccaggagatctcggtgctgaaggagctcaaggagcagctggaacaagccaagagccacggggagaaggagctgccacagtggttgcgtgaggacgagcgtttccgcctgctgctgaggatgctggagaagcggcagatggaccgagcggagcacaagggtgagcttcagacagacaagatgatgagggcagctgccaaggatgtgcacaggctccgaggccagagctgtaaggaacccccagaagttcagtctttcagggagaagatggcatttttcacccggcctcggatgaatatcccagctctctctgcagatgacgtctaatcgccagaaaagtatttcctttgttccactgaccaggctgtgaacattgactgtggctaaagttatttatgtggtgttatatgaaggtactgagtcacaagtcctctagtgctcttgttggtttgaagatgaaccgactttttagtttgggtcctactgttgttattaaaaacagaacaaaaacaaaacacacacacacacaaaaacagaaacaaaaaaaaccagcattaaaataataagattgtatagtttgtatatttaggagtgtatttttgggaaagaaaatttaaatgaactaaagcagtattgagttgctgctcttcttaaaatcgtttagattttttttggtttgtacagctccaccttttagaggtcttactgcaataagaagtaatgcctgggggacggtaatcctaataggacgtcccgcacttgtcacagtacagctaatttttcctagttaacatattttgtacaatattaaaaaaatgcacagaaaccattgggggggattcagaggtgcatccacggatcttcttgagctgtgacgtgtttttatgtggctgcccaacgtggagcgggcagtgtgataggctgggtgggctaagcagcctagtctatgtgggtgacaggccacgctggtctcagatgcccagtgaagccactaacatgagtgaggggagggctgtggggaactccattcagttttatctccatcaataaagtggcctttcaaaaagaaaaaaaaaaaaaaaaaaaaaaa

SEQ ID NO: 170 - DNA, 3084 bp, Homo sapiens
aatcggttgagagctgagctggacttggcggtgggagccggagcctgcttgttgcagctgtgggtgaggacggctctagctagttcccttttagactatggcgacatacctggagttcatccagcagaatgaagaacgggatggtgtgcgttttagttggaacgtgtggccttccagccggctggaggctacaagaatggttgtacccctggcttgtctccttactcctttgaaagaacgtccagacctacctcctgtacaatatgaacctgtgctttgcagcaggccaacttgtaaagctgttctcaacccactttgtcaggttgattatcgagcaaaactttgggcctgtaatttctgttttcaaagaaatcagtttcctccagcttatggaggcatatctgaggtgaatcaacctgccgaattgatgccccagttttctacaattgagtacgtgatacagcgaggtgctcagtcccctctgatctttctctatgtggttgacacatgcctggaggaagatgaccttcaagcactcaaagagtccctgcagatgtccctgagtcttcttcctccagatgctctggtgggtctgatcacatttggaaggatggtgcaggttcatgagctaagctgtgaaggaatctccaaaagttatgtcttccgagggaccaaggatttaactgcaaagcaaatacaggatatgttgggcctgaccaagccagccatgcccatgcagcaagcacgacctgcacaaccacaggagcacccttttgcttcaagcagatttctgcagcctgttcacaagattgatatgaacctcactgatcttcttggggagctacagagggacccatggccagtaactcaggggaagagacctttgcgatccactggtgtggctttgtccattgctgttggcttgctggagggcacttttccaaacacaggagccaggatcatgctgtttactggaggtccccctacccaagggcctggcatggtggttggagatgaattaaagattcctattcgttcttggcatgatattgagaaagataatgcacgattcatgaaaaaggcaaccaagcactatgagatgcttgctaatcgaacagctgcaaatggtcactgcattgatatttatgcttgtgcccttgatcaaactggacttttggagatgaagtgttgtgcaaatcttactggaggctacatggtaatgggagattctttcaacacttctctcttcaagcagacattccaaagaatctttactaaagattttaatggagatttccgaatggcatttggtgctactttggacgtaaagacctctcgggaactgaagattgcaggagccattggtccatgcgtatctctgaatgtgaaaggactgtgtgtgtcagaaaatgagcttggtgttggtggcacgagtcagtggaaaatctgtggcctagatcctacatctacacttggcatctattttgaagttgtcaatcagcacaacaccccgatcccccaaggaggcagaggagccatccagtttgtcacgcattatcagcactccagcacccagagacgcatccgcgtgaccaccatcgcccgaaattgggcagatgtacagagtcagctcaggcacatagaagcagcatttgaccaggaggctgcggcagtgttgatggcacggcttggggtgttccgagcggagtcagaggaggggcccgatgtgctccggtggctggaccgacaactcatccgactgtgtcaaaagtttggacagtataacaaagaagaccccacttcttttaggttatcagattccttttctctatatcctcagtttatgttccatctgagaagatctccatttcttcaagtgtttaacaacagtcctgatgagtcgtcatattacagacatcattttgcccggcaggacctgacccagtccctcatcatgatccagcccattctctactcttactcctttcatgggccaccagagccagtactcttggatagcagcagcattctagctgacagaattttgctgatggatactttctttcaaattgtcatttatcttggtgagaccatagcccagtggcgtaaagctggctaccaggacatgcccgagtatgaaaacttcaagcaccttctgcaggcaccactggatgatgctcaagaaattctgcaagcacgcttcccgatgccacgttacatcaacacggagcatggaggcagtcaggctcgattccttttgtccaaagtgaacccatctcagacacacaataacctgtatgcttggggacaggaaactggagcacccatcctaactgatgatgttagcctgcaggtgttcatggaccatttgaagaagctggctgtctccagtgcctgttaagctgaggatacaaccaggaaatgcaacggtgtcagattgtgttcaaaatgtctagaaaggcttgataacattcctgttacttttctagcagattttaacaaataatcaaggacattttatatgtaactctttagattataatttatttgtattcctgtctttgtcctttttcttgcactataaaattataaggtcataaatgttttggtacttgtagatgtttatgtgctttttgtatcctaacttttagaatctaaataaaatcagaggtaatgtattttggcagcttgtttaggtgagaatcttaatgatcataaaaggaaataaatctagatgcagaaagtactggctaaaatattgctaatacaaatgtgatttcctgaggtctctgtgtgagtgtgtatgtgttttaagtgacttccttaagaggtgtttcctgaacctaattctcataattaaagtaatgtatatgcaggatcaaaatgaaacaaatataccttatcctaaagagctcataacaaataagttacctccactctataaactcagacctactttttgaagataactgcttttaacctctccttacaagatttttgttgttgatgtatttaattttagcccatgtctcaattctcattttcaaagaatcaatatattaatatacaaaaaaaaaaaaaaaa

SEQ ID NO: 171 - DNA, 43816 bp, Homo sapiens
aagcgttgcacaattcccccaacctccatacatacggcagctcttctagacacaggttttcccaggtcaaatgcggggaccccagccatatctcccaccctgagaaattttggagtttcagggagctcagaagctctgcagaggccaccctctctgaggggattcttcttagacctccatccagaggcaaatgttgacctgtccatgctgaaaccctcaggccttcctgggtcatcttctcccacccgctccttgatgacagggagcaggagcactaaagccacaccagaaatggattcaggactgacaggagccaccttgtcacctaagacatctacaggtgcaatcgtggtgacagaacatactctgccctttacttccccagataagaccttggccagtcctacatcttcggttgtgggaagaaccacccagtctttgggggtgatgtcctctgctctccctgagtcaacctctagaggaatgacacactccgagcaaagaaccagcccatcgctgagtccccaggtcaatggaactccctctaggaactaccctgctacaagcatggtttcaggattgagttccccaaggaccaggaccagttccacagaaggaaattttaccaaagaagcatctacatacacactcactgtagagaccacaagtggcccagtcactgagaagtacacagtccccactgagacctcaacaactgaaggtgacagcacagagaccccctgggacacaagatatattcctgtaaaaatcacatctccaatgaaaacatttgcagattcaactgcatccaaggaaaatgccccagtgtctatgactccagctgagaccacagttactgactcacatactccaggaaggacaaacccatcatttgggacactttattcttccttccttgacctatcacctaaagggaccccaaattccagaggtgaaacaagcctggaactgattctatcaaccactggatatcccttctcctctcctgaacctggctctgcaggacacagcagaataagtaccagtgcgcctttgtcatcatctgcttcagttctcgataataaaatatcagagaccagcatattctcaggccagagtctcacctcccctctgtctcctggggtgcccgaggccagagccagcacaatgcccaactcagctatccctttttccatgacactaagcaatgcagaaacaagtgccgaaagggtcagaagcacaatttcctctctggggactccatcaatatccacaaagcagacagcagagactatccttaccttccatgccttcgctgagaccatggatatacccagcacccacatagccaagactttggcttcagaatggttgggaagtccaggtacccttggtggcaccagcacttcagcgctgacaaccacatctccatctaccactttagtctcagaggagaccaacacccatcactccacgagtggaaaggaaacagaaggaactttgaatacatctatgactccacttgagacctctgctcctggagaagagtccgaaatgactgccaccttggtccccactctaggttttacaactcttgacagcaagatcagaagtccatctcaggtctcttcatcccacccaacaagagagctcagaaccacaggcagcacctctgggaggcagagttccagcacagctgcccacgggagctctgacatcctgagggcaaccacttccagcacctcaaaagcatcatcatggaccagtgaaagcacagctcagcaatttagtgaaccccagcacacacagtgggtggagacaagtcctagcatgaaaacagagagacccccagcatcaaccagtgtggcagcccctatcaccacttctgttccctcagtggtctctggcttcaccaccctgaagaccagctccacaaaagggatttggcttgaagaaacatctgcagacacactcatcggagaatccacagctggcccaaccacccatcagtttgctgttcccactgggatttcaatgacaggaggcagcagcaccaggggaagccagggcacaacccacctactcaccagagccacagcatcatctgagacatccgcagatttgactctggccacgaacggtgtcccagtctccgtgtctccagcagtgagcaagacggctgctggctcaagtcctccaggagggacaaagccatcatatacaatggtttcttctgtcatccctgagacatcatctctacagtcctcagctttcagggaaggaaccagcctgggactgactccattaaacactagacatcccttctcttcccctgaaccagactctgcaggacacaccaagataagcaccagcattcctctgttgtcatctgcttcagttcttgaggataaagtgtcagcgaccagcacattctcacaccacaaagccacctcatctattaccacagggactcctgaaatctcaacaaagacaaagcccagctcagccgttctttcctccatgaccctaagcaatgcagcaacaagtcctgaaagagtcagaaatgcaacttcccctctgactcatccatctccatcaggggaagagacagcagggagtgtcctcactctcagcacctctgctgagactacagactcacctaacatccacccaactgggacactgacttcagaatcgtcagagagtcctagcactctcagcctcccaagtgtctctggagtcaaaaccacattttcttcatctactccttccactcatctatttactagtggagaagaaacagaggaaacttcgaatccatctgtgtctcaacctgagacttctgtttccagagtaaggaccaccttggccagcacctctgtccctaccccagtattccccaccatggacacctggcctacacgttcagctcagttctcttcatcccacctagtgagtgagctcagagctacgagcagtacctcagttacaaactcaactggttcagctcttcctaaaatatctcacctcactgggacggcaacaatgtcacagaccaatagagacacgtttaatgactctgctgcaccccaaagcacaacttggccagagactagtcccagattcaagacagggttaccttcagcaacaaccactgtttcaacctctgccacttctctctctgctactgtaatggtctctaaattcacttctccagcaactagttccatggaagcaacttctatcagggaaccatcaacaaccatcctcacaacagagaccacgaatggcccaggctctatggctgtggcttctaccaacatcccaattggaaagggctacattactgaaggaagattggacacaagccatctgcccattggaaccacagcttcctctgagacatctatggattttaccatggccaaagaaagtgtctcaatgtcagtatctccatctcagtccatggatgctgctggctcaagcactccaggaaggacaagccaattcgttgacacattttctgatgatgtctatcatttaacatccagagaaattacaatacctagagatggaacaagctcagctctgactccacaaatgactgcaactcaccctccatctcctgatcctggctctgctagaagcacctggcttggcatcttgtcctcatctccttcttctcctactcccaaagtcacaatgagctccacattttcaactcagagagtcaccacaagcatgataatggacacagttgaaactagtcggtggaacatgcccaacttaccttccacgacttccttgacaccaagtaatattccaacaagtggtgccataggaaaaagcaccctggttcccttggacactccatctccagccacatcattggaggcatcagaagggggacttccaaccctcagcacctaccctgaatcaacaaacacacccagcatccacctcggagcacacgctagttcagaaagtccaagcaccatcaaacttaccatggcttcagtagtaaaacctggctcttacacacctctcaccttcccctcaatagagacccacattcatgtatcaacagccagaatggcttactcttctgggtcttcacctgagatgacagctcctggagagactaacactggtagtacctgggaccccaccacctacatcaccactacggatcctaaggatacaagttcagctcaggtctctacaccccactcagtgaggacactcagaaccacagaaaaccatccaaagacagagtccgccaccccagctgcttactctggaagtcctaaaatctcaagttcacccaatctcaccagtccggccacaaaagcatggaccatcacagacacaactgaacactccactcaattacattacacaaaattggcagaaaaatcatctggatttgagacacagtcagctccaggacctgtctctgtagtaatccctacctcccctaccattggaagcagcacattggaactaacttctgatgtcccaggggaacccctggtccttgctcccagtgagcagaccacaatcactctccccatggcaacatggctgagtaccagtttgacagaggaaatggcttcaacagaccttgatatttcaagtccaagttcacccatgagtacatttgctatttttccacctatgtccacaccttctcatgaactttcaaagtcagaggcagataccagtgccattagaaatacagattcaacaacgttggatcagcacctaggaatcaggagtttgggcagaactggggacttaacaactgttcctatcaccccactgacaaccacgtggaccagtgtgattgaacactcaacacaagcacaggacaccctttctgcaacgatgagtcctactcacgtgacacagtcactcaaagatcaaacatctataccagcctcagcatccccttcccatcttactgaagtctaccctgagctcgggacacaagggagaagctcctctgaggcaaccactttttggaaaccatctacagacacactgtccagagagattgagactggcccaacaaacattcaatccactccacccatggacaacacaacaacagggagcagtagtagtggagtcaccctgggcatagcccaccttcccataggaacatcctccccagctgagacatccacaaacatggcactggaaagaagaagttctacagccactgtctctatggctgggacaatgggactccttgttactagtgctccaggaagaagcatcagccagtcattaggaagagtttcctctgtcctttctgagtcaactactgaaggagtcacagattctagtaagggaagcagcccaaggctgaacacacagggaaatacagctctctcctcctctcttgaacccagctatgctgaaggaagccagatgagcacaagcatccctctaacctcatctcctacaactcctgatgtggaattcatagggggcagcacattttggaccaaggaggtcaccacagttatgacctcagacatctccaagtcttcagcaaggacagagtccagctcagctacccttatgtccacagctttgggaagcactgaaaatacaggaaaagaaaaactcagaactgcctctatggatcttccatctccaactccatcaatggaggtgacaccatggatttctctcactctcagtaatgcccccaataccacagattcacttgacctcagccatggggtgcacaccagctctgcagggactttggccactgacaggtcattgaatactggtgtcactagagcctccagattggaaaacggctctgatacctcttctaagtccctgtctatgggaaacagcactcacacttccatgacttacacagagaagagtgaagtgtcttcttcaatccatccccgacctgagacctcagctcctggagcagagaccactttgacttccactcctggaaacagggccataagcttaacattgcctttttcatccattccagtggaagaagtcatttctacaggcataacctcaggaccagacatcaactcagcacccatgacacattctcccatcaccccaccaacaattgtatggaccagtacaggcacaattgaacagtccactcaaccactacatgcagtttcttcagaaaaagtttctgtgcagacacagtcaactccatatgtcaactctgtggcagtgtctgcttcccctacccatgagaattcagtctcttctggaagcagcacatcctctccatattcctcagcctcacttgaatccttggattccacaatcagtaggaggaatgcaatcacttcctggctatgggacctcactacatctctccccactacaacttggccaagtactagtttatctgaggcactgtcctcaggccattctggggtttcaaacccaagttcaactacgactgaatttccactcttttcagctgcatccacatctgctgctaagcaaagaaatccagaaacagagacccatggtccccagaatacagccgcgagtactttgaacactgatgcatcctcggtcacaggtctttctgagactcctgtgggggcaagtatcagctctgaagtccctcttccaatggccataacttctagatcagatgtttctggccttacatctgagagtactgctaacccgagtttaggcacagcctcttcagcagggaccaaattaactaggacaatatccctgcccacttcagagtctttggtttcctttagaatgaacaaggatccatggacagtgtcaatccctttggggtcccatccaactactaatacagaaacaagcatcccagtaaacagcgcaggtccacctggcttgtccacagtagcatcagatgtaattgacacaccttcagatggggctgagagtattcccactgtctccttttccccctcccctgatactgaagtgacaactatctcacatttcccagaaaagacaactcattcatttagaaccatttcatctctcactcatgagttgacttcaagagtgacacctattcctggggattggatgagttcagctatgtctacaaagcccacaggagccagtccctccattacactgggagagagaaggacaatcacctctgctgctccaaccacttcccccatagttctcactgctagtttcacagagaccagcacagtttcactggataatgaaactacagtaaaaacctcagatatccttgacgcacggaaaacaaatgagctcccctcagatagcagttcttcttctgatctgatcaacacctccatagcttcttcaactatggatgtcactaaaacagcctccatcagtcccactagcatctcaggaatgacagcaagttcctccccatctctcttctcttcagatagaccccaggttcccacatctacaacagagacaaatacagccacctctccatctgtttccagtaacacctattctcttgatgggggctccaatgtgggtggcactccatccactttaccaccctttacaatcacccaccctgtcgagacaagctcggccctattagcctggtctagaccagtaagaactttcagcaccatggtcagcactgacactgcctccggagaaaatcctacctctagcaattctgtggtgacttctgttccagcaccaggtacatggaccagtgtaggcagtactactgacttacctgccatgggctttctcaagacaagtcctgcaggagaggcacactcacttctagcatcaactattgaaccagccactgccttcactccccatctctcagcagcagtggtcactggatccagtgctacatcagaagccagtcttctcactacgagtgaaagcaaagccattcattcttcaccacagaccccaactacacccacctctggagcaaactgggaaacttcagctactcctgagagccttttggtagtcactgagacttcagacacaacacttacctcaaagattttggtcacagataccatcttgttttcaactgtgtccacgccaccttctaaatttccaagtacggggactctgtctggagcttccttccctactttactcccggacactccagccatccctctcactgccactgagccaacaagttcattagctacatcctttgattccaccccactggtgactatagcttcggatagtcttggcacagtcccagagactaccctgaccatgtcagagacctcaaatggtgatgcactggttcttaagacagtaagtaacccagataggagcatccctggaatcactatccaaggagtaacagaaagtccactccatccttcttccacttccccctctaagattgttgctccacggaatacaacctatgaaggttcgatcacagtggcactttctactttgcctgcgggaactactggttcccttgtattcagtcagagttctgaaaactcagagacaacggctttggtagactcatcagctgggcttgagagggcatctgtgatgccactaaccacaggaagccagggtatggctagctctggaggaatcagaagtgggtccactcactcaactggaaccaaaacattttcttctctccctctgaccatgaacccaggtgaggttacagccatgtctgaaatcaccacgaacagactgacagctactcaatcaacagcacccaaagggatacctgtgaagcccaccagtgctgagtcaggcctcctaacacctgtctctgcctcctcaagcccatcaaaggcctttgcctcactgactacagctcccccaacttgggggatcccacagtctaccttgacatttgagttttctgaggtcccaagtttggatactaagtccgcttctttaccaactcctggacagtccctgaacaccattccagactcagatgcaagcacagcatcttcctcactgtccaagtctccagaaaaaaacccaagggcaaggatgatgacttccacaaaggccataagtgcaagctcatttcaatcaacaggttttactgaaacccctgagggatctgcctccccttctatggcagggcatgaacccagagtccccacttcaggaacaggggaccctagatatgcctcagagagcatgtcttatccagacccaagcaaggcatcatcagctatgacatcgacctctcttgcatcaaaactcacaactctcttcagcacaggtcaagcagcaaggtctggttctagttcctctcccataagcctatccactgagaaagaaacaagcttcctttcccccactgcatccacctccagaaagacttcactatttcttgggccttccatggcaaggcagcccaacatattggtgcatcttcagacttcagctctgacactttctccaacatccactctaaatatgtcccaggaggagcctcctgagttaacctcaagccagaccattgcagaagaagagggaacaacagctgaaacacagacgttaaccttcacaccatctgagaccccaacatccttgttacctgtctcttctcccacagaacccacagccagaagaaagagttctccagaaacatgggcaagctctatttcagttcctgccaagacctccttggttgaaacaactgatggaacgctagtgaccaccataaagatgtcaagccaggcagcacaaggaaattccacgtggcctgccccagcagaggagacggggagcagtccagcaggcacatccccaggaagcccagaaatgtctaccactctcaaaatcatgagctccaaggaacccagcatcagcccagagatcaggtccactgtgagaaattctccttggaagactccagaaacaactgttcccatggagaccacagtggaaccagtcacccttcagtccacagccctaggaagtggcagcaccagcatctctcacctgcccacaggaaccacatcaccaaccaagtcaccaacagaaaatatgttggctacagaaagggtctccctctccccatccccacctgaggcttggaccaacctttattctggaactccaggagggaccaggcagtcactggccacaatgtcctctgtctccctagagtcaccaactgctagaagcatcacagggactggtcagcaaagcagtccagaactggtttcaaagacaactggaatggaattctctatgtggcatggctctactggagggaccacaggggacacacatgtctctctgagcacatcttccaatatccttgaagaccctgtaaccagcccaaactctgtgagctcattgacagataaatccaaacataaaaccgagacatgggtaagcaccacagccattccctccactgtcctgaataataagataatggcagctgaacaacagacaagtcgatctgtggatgaggcttattcatcaactagttcttggtcagatcagacatctgggagtgacatcacccttggtgcatctcctgatgtcacaaacacattatacatcacctccacagcacaaaccacctcactagtgtctctgccctctggagaccaaggcattacaagcctcaccaatccctcaggaggaaaaacaagctctgcgtcatctgtcacatctccttcaatagggcttgagactctgagggccaatgtaagtgcagtgaaaagtgacattgcccctactgctgggcatctatctcagacttcatctcctgcggaagtgagcatcctggacgtaaccacagctcctactccaggtatctccaccaccatcaccaccatgggaaccaactcaatctcaactaccacacccaacccagaagtgggtatgagtaccatggacagcaccccggccacagagaggcgcacaacttctacagaacacccttccacctggtcttccacagctgcatcagattcctggactgtcacagacatgacttcaaacttgaaagttgcaagatctcctggaacaatttccacaatgcatacaacttcattcttagcctcaagcactgaattagactccatgtctactccccatggccgtataactgtcattggaaccagcctggtcactccatcctctgatgcttcagctgtaaagacagagaccagtacaagtgaaagaacattgagtccttcagacacaactgcatctactcccatctcaactttttctcgtgtccagaggatgagcatctcagttcctgacattttaagtacaagttggactcccagtagtacagaagcagaagatgtgcctgtttcaatggtttctacagatcatgctagtacaaagactgacccaaatacgcccctgtccacttttctgtttgattctctgtccactcttgactgggacactgggagatctctgtcatcagccacagccactacctcagctcctcagggggccacaactccccaggaactcactttggaaaccatgatcagcccagctacctcacagttgcccttctctatagggcacattacaagtgcagtcacaccagctgcaatggcaaggagctctggagttactttttcaagaccagatcccacaagcaaaaaggcagagcagacttccactcagcttcccaccaccacttctgcacatccagggcaggtgcccagatcagcagcaacaactctggatgtgatcccacacacagcaaaaactccagatgcaacttttcagagacaagggcagacagctcttacaacagaggcaagagctacatctgactcctggaatgagaaagaaaaatcaaccccaagtgcaccttggatcactgagatgatgaattctgtctcagaagataccatcaaggaggttaccagctcctccagtgtattaaggaccctgaatacgctggacataaacttggaatctgggacgacttcatccccaagttggaaaagcagcccatatgagagaattgccccttctgagtccaccacagacaaagaggcaattcacccttctacaaacacagtagagaccacaggctgggtcacaagttccgaacatgcttctcattccactatcccagcccactcagcgtcatccaaactcacatctccagtggttacaacctccaccagggaacaagcaatagtttctatgtcaacaaccacatggccagagtctacaagggctagaacagagcctaattccttcttgactattgaactgagggacgtcagcccttacatggacaccagctcaaccacacaaacaagtattatctcttccccaggttccactgcgatcaccaaggggcctagaacagaaattacctcctctaagagaatatccagctcattccttgcccagtctatgaggtcgtcagacagcccctcagaagccatcaccaggctgtctaactttcctgccatgacagaatctggaggaatgatccttgctatgcaaacaagtccacctggcgctacatcactaagtgcacctactttggatacatcagccacagcctcctggacagggactccactggctacgactcagagatttacatactcagagaagaccactctctttagcaaaggtcctgaggatacatcacagccaagccctccctctgtggaagaaaccagctcttcctcttccctggtacctatccatgctacaacctcgccttccaatattttgttgacatcacaagggcacagtccctcctctactccacctgtgacctcagttttcttgtctgagacctctggcctggggaagaccacagacatgtcgaggataagcttggaacctggcacaagtttacctcccaatttgagcagtacagcaggtgaggcgttatccacttatgaagcctccagagatacaaaggcaattcatcattctgcagacacagcagtgacgaatatggaggcaaccagttctgaatattctcctatcccaggccatacaaagccatccaaagccacatctccattggttacctcccacatcatgggggacatcacttcttccacatcagtatttggctcctccgagaccacagagattgagacagtgtcctctgtgaaccagggacttcaggagagaagcacatcccaggtggccagctctgctacagagacaagcactgtcattacccatgtgtctagtggtgatgctactactcatgtcaccaagacacaagccactttctctagcggaacatccatctcaagccctcatcagtttataacttctaccaacacatttacagatgtgagcaccaacccctccacctctctgataatgacagaatcttcaggagtgaccatcaccacccaaacaggtcctactggagctgcaacacagggtccatatctcttggacacatcaaccatgccttacttgacagagactccattagctgtgactccagattttatgcaatcagagaagaccactctcataagcaaaggtcccaaggatgtgtcctggacaagccctccctctgtggcagaaaccagctatccctcttccctgacacctttcttggtcacaaccatacctcctgccacttccacgttacaagggcaacatacatcctctcctgtttctgcgacttcagttcttacctctggactggtgaagaccacagatatgttgaacacaagcatggaacctgtgaccaattcacctcaaaatttgaacaatccatcaaatgagatactggccactttggcagccaccacagatatagagactattcatccttccataaacaaagcagtgaccaatatggggactgccagttcagcacatgtactgcattccactctcccagtcagctcagaaccatctacagccacatctccaatggttcctgcctccagcatgggggacgctcttgcttctatatcaatacctggttctgagaccacagacattgagggagagccaacatcctccctgactgctggacgaaaagagaacagcaccctccaggagatgaactcaactacagagtcaaacatcatcctctccaatgtgtctgtgggggctattactgaagccacaaaaatggaagtcccctcttttgatgcaacattcataccaactcctgctcagtcaacaaagttcccagatattttctcagtagccagcagtagactttcaaactctcctcccatgacaatatctacccacatgaccaccacccagacagggtcttctggagctacatcaaagattccacttgccttagacacatcaaccttggaaacctcagcagggactccatcagtggtgactgaggggtttgcccactcaaaaataaccactgcaatgaacaatgatgtcaaggacgtgtcacagacaaaccctccctttcaggatgaagccagctctccctcttctcaagcacctgtccttgtcacaaccttaccttcttctgttgctttcacaccgcaatggcacagtacctcctctcctgtttctatgtcctcagttcttacttcttcactggtaaagaccgcaggcaaggtggatacaagcttagaaacagtgaccagttcacctcaaagtatgagcaacactttggatgacatatcggtcacttcagcagccaccacagatatagagacaacgcatccttccataaacacagtagttaccaatgtggggaccaccggttcagcatttgaatcacattctactgtctcagcttacccagagccatctaaagtcacatctccaaatgttaccacctccaccatggaagacaccacaatttccagatcaatacctaaatcctctaagactacaagaactgagactgagacaacttcctccctgactcctaaactgagggagaccagcatctcccaggagatcacctcgtccacagagacaagcactgttccttacaaagagctcactggtgccactaccgaggtatccaggacagatgtcacttcctctagcagtacatccttccctggccctgatcagtccacagtgtcactagacatctccacagaaaccaacaccaggctgtctacctccccaataatgacagaatctgcagaaataaccatcaccacccaaacaggtcctcatggggctacatcacaggatacttttaccatggacccatcaaatacaaccccccaggcagggatccactcagctatgactcatggattttcacaattggatgtgaccactcttatgagcagaattccacaggatgtatcatggacaagtcctccctctgtggataaaaccagctccccctcttcctttctgtcctcacctgcaatgaccacaccttccctgatttcttctaccttaccagaggataagctctcctctcctatgacttcacttctcacctctggcctagtgaagattacagacatattacgtacacgcttggaacctgtgaccagctcacttccaaatttcagcagcacctcagataagatactggccacttctaaagacagtaaagacacaaaggaaatttttccttctataaacacagaagagaccaatgtgaaagccaacaactctggacatgaatcccattcccctgcactggctgactcagagacacccaaagccacaactcaaatggttatcaccaccactgtgggagatccagctccttccacatcaatgccagtgcatggttcctctgagactacaaacattaagagagagccaacatatttcttgactcctagactgagagagaccagtacctctcaggagtccagctttcccacggacacaagttttctactttccaaagtccccactggtactattactgaggtctccagtacaggggtcaactcttctagcaaaatttccaccccagaccatgataagtccacagtgccacctgacaccttcacaggagagatccccagggtcttcacctcctctattaagacaaaatctgcagaaatgacgatcaccacccaagcaagtcctcctgagtctgcatcgcacagtacccttcccttggacacatcaaccacactttcccagggagggactcattcaactgtgactcagggattcccatactcagaggtgaccactctcatgggcatgggtcctgggaatgtgtcatggatgacaactccccctgtggaagaaaccagctctgtgtcttccctgatgtcttcacctgccatgacatccccttctcctgtttcctccacatcaccacagagcatcccctcctctcctcttcctgtgactgcacttcctacttctgttctggtgacaaccacagatgtgttgggcacaacaagcccagagtctgtaaccagttcacctccaaatttgagcagcatcactcatgagagaccggccacttacaaagacactgcacacacagaagccgccatgcatcattccacaaacaccgcagtgaccaatgtagggacttccgggtctggacataaatcacaatcctctgtcctagctgactcagagacatcgaaagccacacctctgatgagtaccacctccaccctgggggacacaagtgtttccacatcaactcctaatatctctcagactaaccaaattcaaacagagccaacagcatccctgagccctagactgagggagagcagcacgtctgagaagaccagctcaacaacagagacaaatactgccttttcttatgtgcccacaggtgctattactcaggcctccagaacagaaatctcctctagcagaacatccatctcagaccttgatcggcccacaatagcacccgacatctccacaggaatgatcaccaggctcttcacctcccccatcatgacaaaatctgcagaaatgaccgtcaccactcaaacaactactcctggggctacatcacagggtatccttccctgggacacatcaaccacacttttccagggagggactcattcaaccgtgtctcagggattcccacactcagagataaccactcttcggagcagaacccctggagatgtgtcatggatgacaactccccctgtggaagaaaccagctctgggttttccctgatgtcaccttccatgacatccccttctcctgtttcctccacatcaccagagagcatcccctcctctcctctccctgtgactgcacttcttacttctgttctggtgacaaccacaaatgtattgggcacaacaagcccagagcccgtaacgagttcacctccaaatttaagcagccccacacaggagagactgaccacttacaaagacactgcgcacacagaagccatgcatgcttccatgcatacaaacactgcagtggccaacgtggggacctccatttctggacatgaatcacaatcttctgtcccagctgattcacacacatccaaagccacatctccaatgggtatcaccttcgccatgggggatacaagtgtttctacatcaactcctgccttctttgagactagaattcagactgaatcaacatcctctttgattcctggattaagggacaccaggacgtctgaggagatcaacactgtgacagagaccagcactgtcctttcagaagtgcccactactactactactgaggtctccaggacagaagttatcacttccagcagaacaaccatctcagggcctgatcattccaaaatgtcaccctacatctccacagaaaccatcaccaggctctccacttttccttttgtaacaggatccacagaaatggccatcaccaaccaaacaggtcctatagggactatctcacaggctacccttaccctggacacatcaagcacagcttcctgggaagggactcactcacctgtgactcagagatttccacactcagaggagaccactactatgagcagaagtactaagggcgtgtcatggcaaagccctccctctgtggaagaaaccagttctccttcttccccagtgcctttacctgcaataacctcacattcatctctttattccgcagtatcaggaagtagccccacttctgctctccctgtgacttcccttctcacctctggcaggaggaagaccatagacatgttggacacacactcagaacttgtgaccagctccttaccaagtgcaagtagcttctcaggtgagatactcacttctgaagcctccacaaatacagagacaattcacttttcagagaacacagcagaaaccaatatggggaccaccaattctatgcataaactacattcctctgtctcaatccactcccagccatccggacacacacctccaaaggttactggatctatgatggaggacgctattgtttccacatcaacacctggttctcctgagactaaaaatgttgacagagactcaacatcccctctgactcctgaactgaaagaggacagcaccgccctggtgatgaactcaactacagagtcaaacactgttttctccagtgtgtccctggatgctgctactgaggtctccagggcagaagtcacctactatgatcctacattcatgccagcttctgctcagtcaacaaagtccccagacatttcacctgaagccagcagcagtcattctaactctcctcccttgacaatatctacacacaagaccatcgccacacaaacaggtccttctggggtgacatctcttggccaactgaccctggacacatcaaccatagccacctcagcaggaactccatcagccagaactcaggattttgtagattcagaaacaaccagtgtcatgaacaatgatctcaatgatgtgttgaagacaagccctttctctgcagaagaagccaactctctctcttctcaggcacctctccttgtgacaacctcaccttctcctgtaacttccacattgcaagagcacagtacctcctctcttgtttctgtgacctcagtacccacccctacactggcgaagatcacagacatggacacaaacttagaacctgtgactcgttcacctcaaaatttaaggaacaccttggccacttcagaagccaccacagatacacacacaatgcatccttctataaacacagcagtggccaatgtggggaccaccagttcaccaaatgaattctattttactgtctcacctgactcagacccatataaagccacatccgcagtagttatcacttccacctcgggggactcaatagtttccacatcaatgcctagatcctctgcgatgaaaaagattgagtctgagacaactttctccctgatatttagactgagggagactagcacctcccagaaaattggctcatcctcagacacaagcacggtctttgacaaagcattcactgctgctactactgaggtctccagaacagaactcacctcctctagcagaacatccatccaaggcactgaaaagcccacaatgtcaccggacacctccacaagatctgtcaccatgctttctacttttgctggcctgacaaaatccgaagaaaggaccattgccacccaaacaggtcctcatagggcgacatcacagggtacccttacctgggacacatcaatcacaacctcacaggcagggacccactcagctatgactcatggattttcacaattagatttgtccactcttacgagtagagttcctgagtacatatcagggacaagcccaccctctgtggaaaaaaccagctcttcctcttcccttctgtctttaccagcaataacctcaccgtcccctgtacctactacattaccagaaagtaggccgtcttctcctgttcatctgacttcactccccacctctggcctagtgaagaccacagatatgctggcatctgtggccagtttacctccaaacttgggcagcacctcacataagataccgactacttcagaagacattaaagatacagagaaaatgtatccttccacaaacatagcagtaaccaatgtggggaccaccacttctgaaaaggaatcttattcgtctgtcccagcctactcagaaccacccaaagtcacctctccaatggttacctctttcaacataagggacaccattgtttccacatccatgcctggctcctctgagattacaaggattgagatggagtcaacattctccctggctcatgggctgaagggaaccagcacctcccaggaccccatcgtatccacagagaaaagtgctgtccttcacaagttgaccactggtgctactgagacctctaggacagaagttgcctcttctagaagaacatccattccaggccctgatcattccacagagtcaccagacatctccactgaagtgatccccagcctgcctatctcccttggcattacagaatcttcaaatatgaccatcatcactcgaacaggtcctcctcttggctctacatcacagggcacatttaccttggacacaccaactacatcctccagggcaggaacacactcgatggcgactcaggaatttccacactcagaaatgaccactgtcatgaacaaggaccctgagattctatcatggacaatccctccttctatagagaaaaccagcttctcctcttccctgatgccttcaccagccatgacttcacctcctgtttcctcaacattaccaaagaccattcacaccactccttctcctatgacctcactgctcacccctagcctagtgatgaccacagacacattgggcacaagcccagaacctacaaccagttcacctccaaatttgagcagtacctcacatgagatactgacaacagatgaagacaccacagctatagaagccatgcatccttccacaagcacagcagcgactaatgtggaaaccaccagttctggacatgggtcacaatcctctgtcctagctgactcagaaaaaaccaaggccacagctccaatggataccacctccaccatggggcatacaactgtttccacatcaatgtctgtttcctctgagactacaaaaattaagagagagtcaacatattccttgactcctggactgagagagaccagcatttcccaaaatgccagcttttccactgacacaagtattgttctttcagaagtccccactggtactactgctgaggtctccaggacagaagtcacctcctctggtagaacatccatccctggcccttctcagtccacagttttgccagaaatatccacaagaacaatgacaaggctctttgcctcgcccaccatgacagaatcagcagaaatgaccatccccactcaaacaggtccttctgggtctacctcacaggatacccttaccttggacacatccaccacaaagtcccaggcaaagactcattcaactttgactcagagatttccacactcagagatgaccactctcatgagcagaggtcctggagatatgtcatggcaaagctctccctctctggaaaatcccagctctctcccttccctgctgtctttacctgccacaacctcacctcctcccatttcctccacattaccagtgactatctcctcctctcctcttcctgtgacttcacttctcacctctagcccggtaacgaccacagacatgttacacacaagcccagaacttgtaaccagttcacctccaaagctgagccacacttcagatgagagactgaccactggcaaggacaccacaaatacagaagctgtgcatccttccacaaacacagcagcgtccaatgtggagattcccagctctggacatgaatccccttcctctgccttagctgactcagagacatccaaagccacatcaccaatgtttattacctccacccaggaggatacaactgttgccatatcaacccctcacttcttggagactagcagaattcagaaagagtcaatttcctccctgagccctaaattgagggagacaggcagttctgtggagacaagctcagccatagagacaagtgctgtcctttctgaagtgtccattggtgctactactgagatctccaggacagaagtcacctcctctagcagaacatccatctctggttctgctgagtccacaatgttgccagaaatatccaccacaagaaaaatcattaagttccctacttcccccatcctggcagaatcatcagaaatgaccatcaagacccaaacaagtcctcctgggtctacatcagagagtacctttacattagacacatcaaccactccctccttggtaataacccattcgactatgactcagagattgccacactcagagataaccactcttgtgagtagaggtgctggggatgtgccacggcccagctctctccctgtggaagaaacaagccctccatcttcccagctgtctttatctgccatgatctcaccttctcctgtttcttccacattaccagcaagtagccactcctcttctgcttctgtgacttcacttctcacaccaggccaagtgaagactactgaggtgttggacgcaagtgcagaacctgaaaccagttcacctccaagtttgagcagcacctcagttgaaatactggccacctctgaagtcaccacagatacggagaaaattcatcctttctcaaacacggcagtaaccaaagttggaacttccagttctggacatgaatccccttcctctgtcctacctgactcagagacaaccaaagccacatcggcaatgggtaccatctccattatgggggatacaagtgtttctacattaactcctgccttatctaacactaggaaaattcagtcagagccagcttcctcactgaccaccagattgagggagaccagcacctctgaagagaccagcttagccacagaagcaaacactgttctttctaaagtgtccactggtgctactactgaggtctccaggacagaagccatctcctttagcagaacatccatgtcaggccctgagcagtccacaatgtcacaagacatctccataggaaccatccccaggatttctgcctcctctgtcctgacagaatctgcaaaaatgaccatcacaacccaaacaggtccttcggagtctacactagaaagtacccttaatttgaacacagcaaccacaccctcttgggtggaaacccactctatagtaattcagggatttccacacccagagatgaccacttccatgggcagaggtcctggaggtgtgtcatggcctagccctccctttgtgaaagaaaccagccctccatcctccccgctgtctttacctgccgtgacctcacctcatcctgtttccaccacattcctagcacatatccccccctctccccttcctgtgacttcacttctcacctctggcccggcgacaaccacagatatcttgggtacaagcacagaacctggaaccagttcatcttcaagtttgagcaccacctcccatgagagactgaccacttacaaagacactgcacatacagaagccgtgcatccttccacaaacacaggagggaccaatgtggcaaccaccagctctggatataaatcacagtcctctgtcctagctgactcatctccaatgtgtaccacctccaccatgggggatacaagtgttctcacatcaactcctgccttccttgagactaggaggattcagacagagctagcttcctccctgacccctggattgagggagtccagcggctctgaagggaccagctcaggcaccaagatgagcactgtcctctctaaagtgcccactggtgctactactgagatctccaaggaagacgtcacctccatcccaggtcccgctcaatccacaatatcaccagacatctccacaagaaccgtcagctggttctctacatcccctgtcatgacagaatcagcagaaataaccatgaacacccatacaagtcctttaggggccacaacacaaggcaccagtactttggacacgtcaagcacaacctctttgacaatgacacactcaactatatctcaaggattttcacactcacagatgagcactcttatgaggaggggtcctgaggatgtatcatggatgagccctccccttctggaaaaaactagaccttccttttctctgatgtcttcaccagccacaacttcaccttctcctgtttcctccacattaccagagagcatctcttcctctcctcttcctgtgacttcactcctcacgtctggcttggcaaaaactacagatatgttgcacaaaagctcagaacctgtaaccaactcacctgcaaatttgagcagcacctcagttgaaatactggccacctctgaagtcaccacagatacagagaaaactcatccttcttcaaacagaacagtgaccgatgtggggacctccagttctggacatgaatccacttcctttgtcctagctgactcacagacatccaaagtcacatctccaatggttattacctccaccatggaggatacgagtgtctccacatcaactcctggcttttttgagactagcagaattcagacagaaccaacatcctccctgacccttggactgagaaagaccagcagctctgaggggaccagcttagccacagagatgagcactgtcctttctggagtgcccactggtgccactgctgaagtctccaggacagaagtcacctcctctagcagaacatccatctcaggctttgctcagctcacagtgtcaccagagacttccacagaaaccatcaccagactccctacctccagcataatgacagaatcagcagaaatgatgatcaagacacaaacagatcctcctgggtctacaccagagagtactcatactgtggacatatcaacaacacccaactgggtagaaacccactcgactgtgactcagagattttcacactcagagatgaccactcttgtgagcagaagccctggtgatatgttatggcctagtcaatcctctgtggaagaaaccagctctgcctcttccctgctgtctctgcctgccacgacctcaccttctcctgtttcctctacattagtagaggatttcccttccgcttctcttcctgtgacttctcttctcaaccctggcctggtgataaccacagacaggatgggcataagcagagaacctggaaccagttccacttcaaatttgagcagcacctcccatgagagactgaccactttggaagacactgtagatacagaagacatgcagccttccacacacacagcagtgaccaacgtgaggacctccatttctggacatgaatcacaatcttctgtcctatctgactcagagacacccaaagccacatctccaatgggtaccacctacaccatgggggaaacgagtgtttccatatccacttctgacttctttgagaccagcagaattcagatagaaccaacatcctccctgacttctggattgagggagaccagcagctctgagaggatcagctcagccacagagggaagcactgtcctttctgaagtgcccagtggtgctaccactgaggtctccaggacagaagtgatatcctctaggggaacatccatgtcagggcctgatcagttcaccatatcaccagacatctctactgaagcgatcaccaggctttctacttcccccattatgacagaatcagcagaaagtgccatcactattgagacaggttctcctggggctacatcagagggtaccctcaccttggacacctcaacaacaaccttttggtcagggacccactcaactgcatctccaggattttcacactcagagatgaccactcttatgagtagaactcctggagatgtgccatggccgagccttccctctgtggaagaagccagctctgtctcttcctcactgtcttcacctgccatgacctcaacttcttttttctccacattaccagagagcatctcctcctctcctcatcctgtgactgcacttctcacccttggcccagtgaagaccacagacatgttgcgcacaagctcagaacctgaaaccagttcacctccaaatttgagcagcacctcagctgaaatattagccacgtctgaagtcaccaaagatagagagaaaattcatccctcctcaaacacacctgtagtcaatgtagggactgtgatttataaacatctatccccttcctctgttttggctgacttagtgacaacaaaacccacatctccaatggctaccacctccactctggggaatacaagtgtttccacatcaactcctgccttcccagaaactatgatgacacagccaacttcctccctgacttctggattaagggagatcagtacctctcaagagaccagctcagcaacagagagaagtgcttctctttctggaatgcccactggtgctactactaaggtctccagaacagaagccctctccttaggcagaacatccaccccaggtcctgctcaatccacaatatcaccagaaatctccacggaaaccatcactagaatttctactcccctcaccacgacaggatcagcagaaatgaccatcacccccaaaacaggtcattctggggcatcctcacaaggtacctttaccttggacacatcaagcagagcctcctggccaggaactcactcagctgcaactcacagatctccacactcagggatgaccactcctatgagcagaggtcctgaggatgtgtcatggccaagccgcccatcagtggaaaaaactagccctccatcttccctggtgtctttatctgcagtaacctcaccttcgccactttattccacaccatctgagagtagccactcatctcctctccgggtgacttctcttttcacccctgtcatgatgaagaccacagacatgttggacacaagcttggaacctgtgaccacttcacctcccagtatgaatatcacctcagatgagagtctggccacttctaaagccaccatggagacagaggcaattcagctttcagaaaacacagctgtgactcagatgggcaccatcagcgctagacaagaattctattcctcttatccaggcctcccagagccatccaaagtgacatctccagtggtcacctcttccaccataaaagacattgtttctacaaccatacctgcttcctctgagataacaagaattgagatggagtcaacatccaccctgacccccacaccaagggagaccagcacctcccaggagatccactcagccacaaagccaagcactgttccttacaaggcactcactagtgccacgattgaggactccatgacacaagtcatgtcctctagcagaggacctagccctgatcagtccacaatgtcacaagacatatccactgaagtgatcaccaggctctctacctcccccatcaagacagaatctacagaaatgaccattaccacccaaacaggttctcctggggctacatcaaggggtacccttaccttggacacttcaacaacttttatgtcagggacccactcaactgcatctcaaggattttcacactcacagatgaccgctcttatgagtagaactcctggagatgtgccatggctaagccatccctctgtggaagaagccagctctgcctctttctcactgtcttcacctgtcatgacctcatcttctcccgtttcttccacattaccagacagcatccactcttcttcgcttcctgtgacatcacttctcacctcagggctggtgaagaccacagagctgttgggcacaagctcagaacctgaaaccagttcacccccaaatttgagcagcacctcagctgaaatactggccatcactgaagtcactacagatacagagaaactggagatgaccaatgtggtaacctcaggttatacacatgaatctccttcctctgtcctagctgactcagtgacaacaaaggccacatcttcaatgggtatcacctaccccacaggagatacaaatgttctcacatcaacccctgccttctctgacaccagtaggattcaaacaaagtcaaagctctcactgactcctgggttgatggagaccagcatctctgaagagaccagctctgccacagaaaaaagcactgtcctttctagtgtgcccactggtgctactactgaggtctccaggacagaagccatctcttctagcagaacatccatcccaggccctgctcaatccacaatgtcatcagacacctccatggaaaccatcactagaatttctacccccctcacaaggaaagaatcaacagacatggccatcacccccaaaacaggtccttctggggctacctcgcagggtacctttaccttggactcatcaagcacagcctcctggccaggaactcactcagctacaactcagagatttccacagtcagtggtgacaactcctatgagcagaggtcctgaggatgtgtcatggccaagcccgctgtctgtggaaaaaaacagccctccatcttccctggtatcttcatcttcagtaacctcaccttcgccactttattccacaccatctgggagtagccactcctctcctgtccctgtcacttctcttttcacctctatcatgatgaaggccacagacatgttggatgcaagtttggaacctgagaccacttcagctcccaatatgaatatcacctcagatgagagtctggccgcttctaaagccaccacggagacagaggcaattcacgtttttgaaaatacagcagcgtcccatgtggaaaccaccagtgctacagaggaactctattcctcttccccaggcttctcagagccaacaaaagtgatatctccagtggtcacctcttcctctataagagacaacatggtttccacaacaatgcctggctcctctggcattacaaggattgagatagagtcaatgtcatctctgacccctggactgagggagaccagaacctcccaggacatcacctcatccacagagacaagcactgtcctttacaagatgccctctggtgccactcctgaggtctccaggacagaagttatgccctctagcagaacatccattcctggccctgctcagtccacaatgtcactagacatctccgatgaagttgtcaccaggctgtctacctctcccatcatgacagaatctgcagaaataaccatcaccacccaaacaggttattctctggctacatcccaggttacccttcccttgggcacctcaatgacctttttgtcagggacccactcaactatgtctcaaggactttcacactcagagatgaccaatcttatgagcaggggtcctgaaagtctgtcatggacgagccctcgctttgtggaaacaactagatcttcctcttctctgacatcattacctctcacgacctcactttctcctgtgtcctccacattactagacagtagcccctcctctcctcttcctgtgacttcacttatcctcccaggcctggtgaagactacagaagtgttggatacaagctcagagcctaaaaccagttcatctccaaatttgagcagcacctcagttgaaataccggccacctctgaaatcatgacagatacagagaaaattcatccttcctcaaacacagcggtggccaaagtgaggacctccagttctgttcatgaatctcattcctctgtcctagctgactcagaaacaaccataaccataccttcaatgggtatcacctccgctgtggacgataccactgttttcacatcaaatcctgccttctctgagactaggaggattccgacagagccaacattctcattgactcctggattcagggagactagcacctctgaagagaccacctcaatcacagaaacaagtgcagtcctttatggagtgcccactagtgctactactgaagtctccatgacagaaatcatgtcctctaatagaatacacatccctgactctgatcagtccacgatgtctccagacatcatcactgaagtgatcaccaggctctcttcctcatccatgatgtcagaatcaacacaaatgaccatcaccacccaaaaaagttctcctggggctacagcacagagtactcttaccttggccacaacaacagcccccttggcaaggacccactcaactgttcctcctagatttttacactcagagatgacaactcttatgagtaggagtcctgaaaatccatcatggaagagctctctctttgtggaaaaaactagctcttcatcttctctgttgtccttacctgtcacgacctcaccttctgtttcttccacattaccgcagagtatcccttcctcctctttttctgtgacttcactcctcaccccaggcatggtgaagactacagacacaagcacagaacctggaaccagtttatctccaaatctgagtggcacctcagttgaaatactggctgcctctgaagtcaccacagatacagagaaaattcatccttcttcaagcatggcagtgaccaatgtgggaaccaccagttctggacatgaactatattcctctgtttcaatccactcggagccatccaaggctacatacccagtgggtactccctcttccatggctgaaacctctatttccacatcaatgcctgctaattttgagaccacaggatttgaggctgagccattttctcatttgacttctggatttaggaagacaaacatgtccctggacaccagctcagtcacaccaacaaatacaccttcttctcctgggtccactcaccttttacagagttccaagactgatttcacctcttctgcaaaaacatcatccccagactggcctccagcctcacagtatactgaaattccagtggacataatcaccccctttaatgcttctccatctattacggagtccactgggataacctccttcccagaatccaggtttactatgtctgtaacagaaagtactcatcatctgagtacagatttgctgccttcagctgagactatttccactggcacagtgatgccttctctatcagaggccatgacttcatttgccaccactggagttccacgagccatctcaggttcaggtagtccattctctaggacagagtcaggccctggggatgctactctgtccaccattgcagagagcctgccttcatccactcctgtgccattctcctcttcaaccttcactaccactgattcttcaaccatcccagccctccatgagataacttcctcttcagctaccccatatagagtggacaccagtcttgggacagagagcagcactactgaaggacgcttggttatggtcagtactttggacacttcaagccaaccaggcaggacatcttcatcacccattttggataccagaatgacagagagcgttgagctgggaacagtgacaagtgcttatcaagttccttcactctcaacacggttgacaagaactgatggcattatggaacacatcacaaaaatacccaatgaagcagcacacagaggtaccataagaccagtcaaaggccctcagacatccacttcgcctgccagtcctaaaggactacacacaggagggacaaaaagaatggagaccaccaccacagctctgaagaccaccaccacagctctgaagaccacttccagagccaccttgaccaccagtgtctatactcccactttgggaacactgactcccctcaatgcatcaatgcaaatggccagcacaatccccacagaaatgatgatcacaaccccatatgttttccctgatgttccagaaacgacatcctcattggctaccagcctgggagcagaaaccagcacagctcttcccaggacaaccccatctgttttcaatagagaatcagagaccacagcctcactggtctctcgttctggggcagagagaagtccggttattcaaactctagatgtttcttctagtgagccagatacaacagcttcatgggttatccatcctgcagagaccatcccaactgtttccaagacaacccccaattttttccacagtgaattagacactgtatcttccacagccaccagtcatggggcagacgtcagctcagccattccaacaaatatctcacctagtgaactagatgcactgaccccactggtcactatttcggggacagatactagtacaacattcccaacactgactaagtccccacatgaaacagagacaagaaccacatggctcactcatcctgcagagaccagctcaactattcccagaacaatccccaatttttctcatcatgaatcagatgccacaccttcaatagccaccagtcctggggcagaaaccagttcagctattccaattatgactgtctcacctggtgcagaagatctggtgacctcacaggtcactagttctgggacagacagaaatatgactattccaactttgactctttctcctggtgaaccaaagacgatagcctcattagtcacccatcctgaagcacagacaagttcggccattccaacttcaactatctcgcctgctgtatcacggttggtgacctcaatggtcaccagtttggcggcaaagacaagtacaactaatcgagctctgacaaactcccctggtgaaccagctacaacagtttcattggtcacgcatcctgcacagaccagcccaacagttccctggacaacttccatttttttccatagtaaatcagacaccacaccttcaatgaccaccagtcatggggcagaatccagttcagctgttccaactccaactgtttcaactgaggtaccaggagtagtgacccctttggtcaccagttctagggcagtgatcagtacaactattccaattctgactctttctcctggtgaaccagagaccacaccttcaatggccaccagtcatggggaagaagccagttctgctattccaactccaactgtttcacctggggtaccaggagtggtgacctctctggtcactagttctagggcagtgactagtacaactattccaattctgactttttctcttggtgaaccagagaccacaccttcaatggccaccagtcatgggacagaagctggctcagctgttccaactgttttacctgaggtaccaggaatggtgacctctctggttgctagttctagggcagtaaccagtacaactcttccaactctgactctttctcctggtgaaccagagaccacaccttcaatggccaccagtcatggggcagaagccagctcaactgttccaactgtttcacctgaggtaccaggagtggtgacctctctggtcactagttctagtggagtaaacagtacaagtattccaactctgattctttctcctggtgaactagaaaccacaccttcaatggccaccagtcatggggcagaagccagctcagctgttccaactccaactgtttcacctggggtatcaggagtggtgacccctctggtcactagttccagggcagtgaccagtacaactattccaattctaactctttcttctagtgagccagagaccacaccttcaatggccaccagtcatggggtagaagccagctcagctgttctaactgtttcacctgaggtaccaggaatggtgacctctctggtcactagttctagagcagtaaccagtacaactattccaactctgactatttcttctgatgaaccagagaccacaacttcattggtcacccattctgaggcaaagatgatttcagccattccaactttagctgtctcccctactgtacaagggctggtgacttcactggtcactagttctgggtcagagaccagtgcgttttcaaatctaactgttgcctcaagtcaaccagagaccatagactcatgggtcgctcatcctgggacagaagcaagttctgttgttccaactttgactgtctccactggtgagccgtttacaaatatctcattggtcacccatcctgcagagagtagctcaactcttcccaggacaacctcaaggttttcccacagtgaattagacactatgccttctacagtcaccagtcctgaggcagaatccagctcagccatttcaacaactatttcacctggtataccaggtgtgctgacatcactggtcactagctctgggagagacatcagtgcaacttttccaacagtgcctgagtccccacatgaatcagaggcaacagcctcatgggttactcatcctgcagtcaccagcacaacagttcccaggacaacccctaattattctcatagtgaaccagacaccacaccatcaatagccaccagtcctggggcagaagccacttcagattttccaacaataactgtctcacctgatgtaccagatatggtaacctcacaggtcactagttctgggacagacaccagtataactattccaactctgactctttcttctggtgagccagagaccacaacctcatttatcacctattctgagacacacacaagttcagccattccaactctccctgtctcccctggtgcatcaaagatgctgacctcactggtcatcagttctgggacagacagcactacaactttcccaacactgacggagaccccatatgaaccagagacaacagccatacagctcattcatcctgcagagaccaacacaatggttcccaggacaactcccaagttttcccatagtaagtcagacaccacactcccagtagccatcaccagtcctgggccagaagccagttcagctgtttcaacgacaactatctcacctgatatgtcagatctggtgacctcactggtccctagttctgggacagacaccagtacaaccttcccaacattgagtgagaccccatatgaaccagagactacagccacgtggctcactcatcctgcagaaaccagcacaacggtttctgggacaattcccaacttttcccataggggatcagacactgcaccctcaatggtcaccagtcctggagtagacacgaggtcaggtgttccaactacaaccatcccacccagtataccaggggtagtgacctcacaggtcactagttctgcaacagacactagtacagctattccaactttgactccttctcctggtgaaccagagaccacagcctcatcagctacccatcctgggacacagactggcttcactgttccaattcggactgttccctctagtgagccagatacaatggcttcctgggtcactcatcctccacagaccagcacacctgtttccagaacaacctccagtttttcccatagtagtccagatgccacacctgtaatggccaccagtcctaggacagaagccagttcagctgtactgacaacaatctcacctggtgcaccagagatggtgacttcacagatcactagttctggggcagcaaccagtacaactgttccaactttgactcattctcctggtatgccagagaccacagccttattgagcacccatcccagaacagagacaagtaaaacatttcctgcttcaactgtgtttcctcaagtatcagagaccacagcctcactcaccattagacctggtgcagagactagcacagctctcccaactcagacaacatcctctctcttcaccctacttgtaactggaaccagcagagttgatctaagtccaactgcttcacctggtgtttctgcaaaaacagccccactttccacccatccagggacagaaaccagcacaatgattccaacttcaactctttcccttggtttactagagactacaggcttactggccaccagctcttcagcagagaccagcacgagtactctaactctgactgtttcccctgctgtctctgggctttccagtgcctctataacaactgataagccccaaactgtgacctcctggaacacagaaacctcaccatctgtaacttcagttggacccccagaattttccaggactgtcacaggcaccactatgaccttgataccatcagagatgccaacaccacctaaaaccagtcatggagaaggagtgagtccaaccactatcttgagaactacaatggttgaagccactaatttagctaccacaggttccagtcccactgtggccaagacaacaaccaccttcaatacactggctggaagcctctttactcctctgaccacacctgggatgtccaccttggcctctgagagtgtgacctcaagaacaagttataaccatcggtcctggatctccaccaccagcagttataaccgtcggtactggacccctgccaccagcactccagtgacttctacattctccccagggatttccacatcctccatccccagctccacagcagccacagtcccattcatggtgccattcaccctcaacttcaccatcaccaacctgcagtacgaggaggacatgcggcaccctggttccaggaagttcaacgccacagagagagaactgcagggtctgctcaaacccttgttcaggaatagcagtctggaatacctctattcaggctgcagactagcctcactcaggccagagaaggatagctcagccacggcagtggatgccatctgcacacatcgccctgaccctgaagacctcggactggacagagagcgactgtactgggagctgagcaatctgacaaatggcatccaggagctgggcccctacaccctggaccggaacagtctctatgtcaatggtttcacccatcgaagctctatgcccaccaccagcactcctgggacctccacagtggatgtgggaacctcagggactccatcctccagccccagccccacgactgctggccctctcctgatgccgttcaccctcaacttcaccatcaccaacctgcagtacgaggaggacatgcgtcgcactggctccaggaagttcaacaccatggagagtgtcctgcagggtctgctcaagcccttgttcaagaacaccagtgttggccctctgtactctggctgcagattgaccttgctcaggcccgagaaagatggggcagccactggagtggatgccatctgcacccaccgccttgaccccaaaagccctggactcaacagggagcagctgtactgggagctaagcaaactgaccaatgacattgaagagctgggcccctacaccctggacaggaacagtctctatgtcaatggtttcacccatcagagctctgtgtccaccaccagcactcctgggacctccacagtggatctcagaacctcagggactccatcctccctctccagccccacaattatggctgctggccctctcctggtaccattcaccctcaacttcaccatcaccaacctgcagtatggggaggacatgggtcaccctggctccaggaagttcaacaccacagagagggtcctgcagggtctgcttggtcccatattcaagaacaccagtgttggccctctgtactctggctgcagactgacctctctcaggtctgagaaggatggagcagccactggagtggatgccatctgcatccatcatcttgaccccaaaagccctggactcaacagagagcggctgtactgggagctgagccaactgaccaatggcatcaaagagctgggcccctacaccctggacaggaacagtctctatgtcaatggtttcacccatcggacctctgtgcccaccagcagcactcctgggacctccacagtggaccttggaacctcagggactccattctccctcccaagccccgcaactgctggccctctcctggtgctgttcaccctcaacttcaccatcaccaacctgaagtatgaggaggacatgcatcgccctggctccaggaagttcaacaccactgagagggtcctgcagactctgcttggtcctatgttcaagaacaccagtgttggccttctgtactctggctgcagactgaccttgctcaggtccgagaaggatggagcagccactggagtggatgccatctgcacccaccgtcttgaccccaaaagccctggagtggacagggagcagctatactgggagctgagccagctgaccaatggcatcaaagagctgggcccctacaccctggacaggaacagtctctatgtcaatggtttcacccattggatccctgtgcccaccagcagcactcctgggacctccacagtggaccttgggtcagggactccatcctccctccccagccccacaactgctggccctctcctggtgccgttcaccctcaacttcaccatcaccaacctgaagtacgaggaggacatgcattgccctggctccaggaagttcaacaccacagagagagtcctgcagagtctgcttggtcccatgttcaagaacaccagtgttggccctctgtactctggctgcagactgaccttgctcaggtccgagaaggatggagcagccactggagtggatgccatctgcacccaccgtcttgaccccaaaagccctggagtggacagggagcagctatactgggagctgagccagctgaccaatggcatcaaagagctgggtccctacaccctggacagaaacagtctctatgtcaatggtttcacccatcagacctctgcgcccaacaccagcactcctgggacctccacagtggaccttgggacctcagggactccatcctccctccccagccctacatctgctggccctctcctggtgccattcaccctcaacttcaccatcaccaacctgcagtacgaggaggacatgcatcacccaggctccaggaagttcaacaccacggagcgggtcctgcagggtctgcttggtcccatgttcaagaacaccagtgtcggccttctgtactctggctgcagactgaccttgctcaggcctgagaagaatggggcagccactggaatggatgccatctgcagccaccgtcttgaccccaaaagccctggactcaacagagagcagctgtactgggagctgagccagctgacccatggcatcaaagagctgggcccctacaccctggacaggaacagtctctatgtcaatggtttcacccatcggagctctgtggcccccaccagcactcctgggacctccacagtggaccttgggacctcagggactccatcctccctccccagccccacaacagctgttcctctcctggtgccgttcaccctcaactttaccatcaccaatctgcagtatggggaggacatgcgtcaccctggctccaggaagttcaacaccacagagagggtcctgcagggtctgcttggtcccttgttcaagaactccagtgtcggccctctgtactctggctgcagactgatctctctcaggtctgagaaggatggggcagccactggagtggatgccatctgcacccaccaccttaaccctcaaagccctggactggacagggagcagctgtactggcagctgagccagatgaccaatggcatcaaagagctgggcccctacaccctggaccggaacagtctctacgtcaatggtttcacccatcggagctctgggctcaccaccagcactccttggacttccacagttgaccttggaacctcagggactccatcccccgtccccagccccacaaccaccggccctctcctggtgccattcacactcaacttcaccatcactaacctacagtatgaggagaacatgggtcaccctggctccaggaagttcaacatcacggagagtgttctgcagggtctgctcaagcccttgttcaagagcaccagtgttggccctctgtattctggctgcagactgaccttgctcaggcctgagaaggatggagtagccaccagagtggacgccatctgcacccaccgccctgaccccaaaatccctgggctagacagacagcagctatactgggagctgagccagctgacccacagcatcactgagctgggaccctacaccctggatagggacagtctctatgtcaatggtttcacccagcggagctctgtgcccaccaccagcactcctgggactttcacagtacagccggaaacctctgagactccatcatccctccctggccccacagccactggccctgtcctgctgccattcaccctcaattttaccatcactaacctgcagtatgaggaggacatgcgtcgccctggctccaggaagttcaacaccacggagagggtccttcagggtctgcttatgcccttgttcaagaacaccagtgtcagctctctgtactctggttgcagactgaccttgctcaggcctgagaaggatggggcagccaccagagtggatgctgtctgcacccatcgtcctgaccccaaaagccctggactggacagagagcggctgtactggaagctgagccagctgacccacggcatcactgagctgggcccctacaccctggacaggcacagtctctatgtcaatggtttcacccatcagagctctatgacgaccaccagaactcctgatacctccacaatgcacctggcaacctcgagaactccagcctccctgtctggacccatgaccgccagccctctcctggtgctattcacaattaacttcaccatcactaacctgcggtatgaggagaacatgcatcaccctggctctagaaagtttaacaccacggagagagtccttcagggtctgctcaggcctgtgttcaagaacaccagtgttggccctctgtactctggctgcagactgaccttgctcaggcccaagaaggatggggcagccaccaaagtggatgccatctgcacctaccgccctgatcccaaaagccctggactggacagagagcagctatactgggagctgagccagctgacccacagcatcactgagctgggcccctacaccctggacagggacagtctctatgtcaatggtttcacacagcggagctctgtgcccaccactagcattcctgggacccccacagtggacctgggaacatctgggactccagtttctaaacctggtccctcggctgccagccctctcctggtgctattcactctcaacttcaccatcaccaacctgcggtatgaggagaacatgcagcaccctggctccaggaagttcaacaccacggagagggtccttcagggcctgctcaggtccctgttcaagagcaccagtgttggccctctgtactctggctgcagactgactttgctcaggcctgaaaaggatgggacagccactggagtggatgccatctgcacccaccaccctgaccccaaaagccctaggctggacagagagcagctgtattgggagctgagccagctgacccacaatatcactgagctgggcccctatgccctggacaacgacagcctctttgtcaatggtttcactcatcggagctctgtgtccaccaccagcactcctgggacccccacagtgtatctgggagcatctaagactccagcctcgatatttggcccttcagctgccagccatctcctgatactattcaccctcaacttcaccatcactaacctgcggtatgaggagaacatgtggcctggctccaggaagttcaacactacagagagggtccttcagggcctgctaaggcccttgttcaagaacaccagtgttggccctctgtactctggctgcaggctgaccttgctcaggccagagaaagatggggaagccaccggagtggatgccatctgcacccaccgccctgaccccacaggccctgggctggacagagagcagctgtatttggagctgagccagctgacccacagcatcactgagctgggcccctacacactggacagggacagtctctatgtcaatggtttcacccatcggagctctgtacccaccaccagcaccggggtggtcagcgaggagccattcacactgaacttcaccatcaacaacctgcgctacatggcggacatgggccaacccggctccctcaagttcaacatcacagacaacgtcatgcagcacctgctcagtcctttgttccagaggagcagcctgggtgcacggtacacaggctgcagggtcatcgcactaaggtctgtgaagaacggtgctgagacacgggtggacctcctctgcacctacctgcagcccctcagcggcccaggtctgcctatcaagcaggtgttccatgagctgagccagcagacccatggcatcacccggctgggcccctactctctggacaaagacagcctctaccttaacggttacaatgaacctggtccagatgagcctcctacaactcccaagccagccaccacattcctgcctcctctgtcagaagccacaacagccatggggtaccacctgaagaccctcacactcaacttcaccatctccaatctccagtattcaccagatatgggcaagggctcagctacattcaactccaccgagggggtccttcagcacctgctcagacccttgttccagaagagcagcatgggccccttctacttgggttgccaactgatctccctcaggcctgagaaggatggggcagccactggtgtggacaccacctgcacctaccaccctgaccctgtgggccccgggctggacatacagcagctttactgggagctgagtcagctgacccatggtgtcacccaactgggcttctatgtcctggacagggatagcctcttcatcaatggctatgcaccccagaatttatcaatccggggcgagtaccagataaatttccacattgtcaactggaacctcagtaatccagaccccacatcctcagagtacatcaccctgctgagggacatccaggacaaggtcaccacactctacaaaggcagtcaactacatgacacattccgcttctgcctggtcaccaacttgacgatggactccgtgttggtcactgtcaaggcattgttctcctccaatttggaccccagcctggtggagcaagtctttctagataagaccctgaatgcctcattccattggctgggctccacctaccagttggtggacatccatgtgacagaaatggagtcatcagtttatcaaccaacaagcagctccagcacccagcacttctacctgaatttcaccatcaccaacctaccatattcccaggacaaagcccagccaggcaccaccaattaccagaggaacaaaaggaatattgaggatgcgctcaaccaactcttccgaaacagcagcatcaagagttatttttctgactgtcaagtttcaacattcaggtctgtccccaacaggcaccacaccggggtggactccctgtgtaacttctcgccactggctcggagagtagacagagttgccatctatgaggaatttctgcggatgacccggaatggtacccagctgcagaacttcaccctggacaggagcagtgtccttgtggatgggtattctcccaacagaaatgagcccttaactgggaattctgaccttcccttctgggctgtcatcctcatcggcttggcaggactcctgggagtcatcacatgcctgatctgcggtgtcctggtgaccacccgccggcggaagaaggaaggagaatacaacgtccagcaacagtgcccaggctactaccagtcacacctagacctggaggatctgcaatgactggaacttgccggtgcctggggtgcctttcccccagccagggtccaaagaagcttggctggggcagaaataaaccatattggtcgga

SEQ ID NO: 172 - DNA, 3081 bp, Homo sapiens
cttttttgatcttcgaaaagaattcaagaaatgttgccctggttcacctgatattgacaaactggacgttgccacaatgacagagtatttaaattttgagaagagtagttcagtctctcgatatggagcctctcaagttgaagatatggggaatataattttagcaatgatttcagagccttataatcacaggttttcagatccagagagagtgaattacaagtttgaaagtggaacttgcagcaagatggaacttattgatgataacaccgtagtcagggcacgaggtttaccatggcagtcttcagatcaagatattgcaagattcttcaaaggactcaatattgccaagggaggtgcagcactttgtctgaatgctcagggtcgaaggaacggagaagctctggttaggtttgtaagtgaggagcaccgagacctagcactacagaggcacaaacatcacatggggacccggtatattgaggtttacaaagcaacaggtgaagatttccttaaaattgctggtggtacttccaatgaggtagcccagtttctctccaaggaaaatcaagtcattgtccgcatgcgggggctccctttcacggccacagctgaagaagtggtggccttctttggacagcattgccctattactgggggaaaggaaggcatcctctttgtcacctacccagatggtaggccaacaggggacgcttttgtcctctttgcctgtgaggaatatgcacagaatgcgttgaggaagcataaagacttgttgggtaaaagatacattgaactcttcaggagcacagcagctgaagttcagcaggtgctgaatcgattctcctcggcccctctcattccacttccaacccctcccattattccagtactacctcagcaatttgtgccccctacaaatgttagagactgtatacgccttcgaggtcttccctatgcagccacaattgaggacatcctggatttcctgggggagttcgccacagatattcgtactcatggggttcacatggttttgaatcaccagggccgcccatcaggagatgcctttatccagatgaagtctgcggacagagcatttatggctgcacagaagtgtcataaaaaaaacatgaaggacagatatgttgaagtctttcagtgttcagctgaggagatgaactttgtgttaatggggggcactttaaatcgaaatggcttatccccaccgccatgtaagttaccatgcctgtctcctccctcctacacatttccagctcctgctgcagttattcctacagaagctgccatttaccagccctctgtgattttgaatccacgagcactgcagccctccacagcgtactacccagcaggcactcagctcttcatgaactacacagcgtactatcccagtatgcaaccgaggatggacttatacacacaaatgaccaggccaggactctacccaaagaatgggtttgtatttaagggccccagcagttagaacatcctcagaaaagaagtgtttgaaagatgtatggtgatcttgaaacctccagacacaagaaaacttctagcaaattcaggggaagtttgtctacactcaggctgcagtattttcagcaaacttgattggacaaacgggcctgtgccttatcttttggtggagtgaaaaaatttgagccagtgaagccaaatcgtaacttacagcaagcagcatgcagcatacctggctctttgctgattgcaaataggcatttaaaatgtgaatttggaatcagatgtctccattacttccagttaaagtggcatcataggcgtttcctaagttttaagtcttggataaaaactccaccagtgtctaccatctccaccatgaactctgttaaggaagcttcattttcgtatattcccgctcttttctcttcatttccctgtcttctgcataatcatgccttcttgctaagtaattcaagcataagatcttggaataataaaatcacaatcttaggagaaagaataaaattgttattttcccagtctcttggccatgatgatatcttatgattaaaaacaaattaaattttaaaacacctgaagatatattagaagaaattgtgcaccctccacaaaacatacaaagtttaaaagtttggatctttttctcagcaggtatcagttgtaaataatgaattaggggccaaaatgcaaaacgaaaaatgaagcagctacatgtagttagtaatttctagtttgaactgtaattgaatattgtggcttcatatgtattattttatattgtacttttttcattattgatggtttggactttaataagagaaattccatagtttttaatatcccagaagtgagacaatttgaacagtgtattctagaaaacaatacactaactgaacagaagtgaatgcttatatatattatgatagccttaaacctttttcctctaatgccttaactgtcaaataattataaccttttaaagcataggactatagtcagcatgctagactgagaggtaaacactgatgcaattagaacaggtactgatgctgtcagtgtttaacactatgtttagctgtgtttatgctataaaagtgcaatattagacactagctagtactgctgcctcatgtaactccaaagaaaacaggatttcattaagtgcattgaatgtggctatttctctaagttactcatattgtcctttgcttgaatgcaatgccgtgcagatttatgtggctgctatttttattttctgtgcattactttaacaccttaaagggagaagcaaacatttccttcttcagctgactggcaatggccctttaactgcaataggaagaaaaaaaaaaaggtttgtgtgaaaattggtgataactggcacttaagatcgaaaagaaatttctgtatacttgatgccttaagatgcccaaagctgcccaaagctctgaaagactttaagataggcagtaatgcttactacaatactactgagtttttgtagagttaacatttgataataaaacttgcctgtttaatctcaaaaaaaaaaaaaaa

SEQ ID NO: 173 - DNA, 2974 bp, Homo sapiens
gtgtgcgtgatggagaaaattgggcaccagggctgctcccgagattctcagatctgatttccacgcttgctaccaaaatagtctgggcaggccacttttggaagtaggcgttatctagtgagcaggcggccgctttcgatttcgctttcccctaaatggctgagcttctcgccagcgcaggatcagcctgttcctgggactttccgagagccccgccctcgttccctcccccagccgccagtaggggaggactcggcggtacccggagcttcaggccccaccggggcgcggagagtcccaggcccggccgggaccgggacggcgtccgagtgccaatggctagctctaggtgtcccgctccccgcgggtgccgctgcctccccggagcttctctcgcatggctggggacagtactgctacttctcgccgactgggtgctgctccggaccgcgctgccccgcatattctccctgctggtgcccaccgcgctgccactgctccgggtctgggcggtgggcctgagccgctgggccgtgctctggctgggggcctgcggggtcctcagggcaacggttggctccaagagcgaaaacgcaggtgcccagggctggctggctgctttgaagccattagctgcggcactgggcttggccctgccgggacttgccttgttccgagagctgatctcatggggagcccccgggtccgcggatagcaccaggctactgcactggggaagtcaccctaccgccttcgttgtcagttatgcagcggcactgcccgcagcagccctgtggcacaaactcgggagcctctgggtgcccggcggtcagggcggctctggaaaccctgtgcgtcggcttctaggctgcctgggctcggagacgcgccgcctctcgctgttcctggtcctggtggtcctctcctctcttggggagatggccattccattctttacgggccgcctcactgactggattctacaagatggctcagccgataccttcactcgaaacttaactctcatgtccattctcaccatagccagtgcagtgctggagttcgtgggtgacgggatctataacaacaccatgggccacgtgcacagccacttgcagggagaggtgtttggggctgtcctgcgccaggagacggagtttttccaacagaaccagacaggtaacatcatgtctcgggtaacagaggacacgtccaccctgagtgattctctgagtgagaatctgagcttatttctgtggtacctggtgcgaggcctatgtctcttggggatcatgctctggggatcagtgtccctcaccatggtcaccctgatcaccctgcctctgcttttccttctgcccaagaaggtgggaaaatggtaccagttgctggaagtgcaggtgcgggaatctctggcaaagtccagccaggtggccattgaggctctgtcggccatgcctacagttcgaagctttgccaacgaggagggcgaagcccagaagtttagggaaaagctgcaagaaataaagacactcaaccagaaggaggctgtggcctatgcagtcaactcctggaccactagtatttcaggtatgctgctgaaagtgggaatcctctacattggtgggcagctggtgaccagtggggctgtaagcagtgggaaccttgtcacatttgttctctaccagatgcagttcacccaggctgtggaggtactgctctccatctaccccagagtacagaaggctgtgggctcctcagagaaaatatttgagtacctggaccgcacccctcgctgcccacccagtggtctgttgactcccttacacttggagggccttgtccagttccaagatgtctcctttgcctacccaaaccgcccagatgtcttagtgctacaggggctgacattcaccctacgccctggcgaggtgacggcgctggtgggacccaatgggtctgggaagagcacagtggctgccctgctgcagaatctgtaccagcccaccgggggacagctgctgttggatgggaagccccttccccaatatgagcaccgctacctgcacaggcaggtggctgcagtgggacaagagccacaggtatttggaagaagtcttcaagaaaatattgcctatggcctgacccagaagccaactatggaggaaatcacagctgctgcagtaaagtctggggcccatagtttcatctctggactccctcagggctatgacacagaggtagacgaggctgggagccagctgtcagggggtcagcgacaggcagtggcgttggcccgagcattgatccggaaaccgtgtgtacttatcctggatgatgccaccagtgccctggatgcaaacagccagttacaggtggagcagctcctgtacgaaagccctgagcggtactcccgctcagtgcttctcatcacccagcacctcagcctggtggagcaggctgaccacatcctctttctggaaggaggcgctatccgggaggggggaacccaccagcagctcatggagaaaaaggggtgctactgggccatggtgcaggctcctgcagatgctccagaatgaaagccttctcagacctgcgcactccatctccctcccttttcttctctctgtggtggagaaccacagctgcagagtaggcagctgcctccaggatgagttacttgaaatttgccttgagtgtgttacctcctttccaagctcctcgtgataatgcagacttcctggagtacaaacacaggatttgtaattccttactgtaacggagtttagagccagggctgatgctttggtgtggccagcactctgaaactgagaaatgttcagaatgtacggaaagatgatcagctattttcaacataactgaaggcatatgctggcccataaacaccctgtaggttcttgatatttataataaaattggtgttttgtaaaaaaaaaaaaaaaaaaaaaaa

SEQ ID NO: 174 - DNA, 1321 bp, Homo sapiens
gaactaccaccggcgtgcgttcgcaggtagatcgcggtgccagttgccatggagccggccgggccctgtggcttctgcccggcgggggaggtccagccagcgcgttacacctgccctcgctgtaatgcgccctactgctcgctgcgctgctaccggacgcatggcacctgcgcagaaaacttctaccgtgaccaggtgctgggagagctccgcggttgcagcgctcctcccagccgcctagcaagcgccctacgccggctgcgtcagcaacgcgagaccgaggacgagcctggggaagcaggcctcagctccggcccggcgcccggcggcctatcgggactctgggagcggctggcgccgggcgaaaaagctgccttcgagcggctgctgagccgcggtgaggccgggcggctgctgcctccatggcggccgtggtggtggaaccgcggagccggaccgcagcttctggaggagctggataatgccccgggtagtgacgccgcggagctggagctcgcccctgcgaggaccccgccggattctgtgaaagatgcctccgccgcggagcccgcggccgccgagcgggttcttggagatgtcccgggggcctgcacgcccgtcgtacccacccgcatccccgcgatagtcagcctgagccgcggcccagtctcgccgctcgtgcgcttccagctgcccaatgtgctgttcgcctacgcgcatactctcgccctgtatcacggcggtgacgacgcgctgctctctgacttctgtgccacactgctcggcgtttccggagccctgggtgcccagcaagtcttcgcctctgcggaagaagccctgcaggcggcagcccacgtgctggaagcaggcgagcacccgccggggcccctgggcacacgaggggctatgcacgaggtcgcccgcatcctgctgggcgagggcccgaccaaccagaaaggctacacgctggcagcactgggggacctggcacagaccctgggccgtgcccggaaacaggccgtggctagagaagagcgagatcatctttaccgggcccggaaaaagtgccagttcctcctggcctggaccaacgaaaatgaggcggccctcacacccctggctctagactgcgccagggctcaccaagcccatgctgtggtagccgaggaggtggccgccctcactggggagctggagcggctttggggaggccccgtgccacctgccccaagaactctcattgaggagctccctagctgaacgggttaccctggtcattaataaagctgtgactggtcaaaaaaaaaaaaaaaaaaaaaaa

SEQ ID NO: 175 - DNA, 1364 bp, Homo sapiens
gcctgatgacgtggcttggcaacgtccctaccgccgccgcttcccgggaacctggcgccgccggaactgatcgcggcctagtcccgacgcgtgtgtgctagtgagccggagccggcgacggcggcagtggcggcccggcctgcaggagcccgacggggtctctgccatgggggagtgacgcgcctgcacccgctgttccgcggcagcggcgagacatgaggagaccccgcgacaggggcagcggcggcggctcgtgagccccgggatggaggagaaatacggcggggacgtgctggccggccccggcggcggcggcggccttgggccggtggacgtacccagcgctcgattaacaaaatatattgtgttactatgtttcactaaatttttgaaggctgtgggacttttcgaatcatatgatctcctaaaagctgttcacattgttcagttcatttttatattaaaacttgggactgcattttttatggttttgtttcaaaagccattttcttctgggaaaactattaccaaacaccagataattggatcactaaaaattcctggtagaaaagaatttaaagacaaaaagttaaatgatcctaggaaactagtgggaaactgagaaatcataaaattgtactctgaagaaaaagatttcaaaatctaccagcagacaagaatatagataatggaaaacagaatactgtcctttttttttttctttctttttttgagaaagagtcttgctccatcgcccaggctgcagtgcagtgacacgatcttgtctcactgcaacctctgcctcccgggttcaagcgattctcctgcctcagcctcctgagtagctggaattacaggcacccaccaccacacccagctcatttttgtatttttagtagagacggggcttcattcaccacattggccagcctggtcttgaactcctgacctcaggtgatctgcctgcctcggcctcacaaagtgctaggattacaggcatgagccacagcacccggcccagaataagaatactgtcttggaaatctagacttagtcaagggatcttatgttttctatttacaaaatatgtaatgatttcacctttaaaatatttgttattattatctttctgtattttatttaaaatttggatatatagcaaaatatatgtgactgaaatttttaatttttttgtttccatttatagtggatcaaaatatttaaacatgcagttgctgggtgtattatttcactcttgtggttttttggcctcactctttgtggaccactaaggtaaataaaaatgcatattttgaaaaaaaaaaaaaaaaaaaaaaaaaaaaaaaaaaaaaaaaaaaaaaaaa

SEQ ID NO: 176 - DNA, 787 bp, Homo sapiens
ggggagccttctgctgctttgctctctgggagatccagctccttgctctgtgtcccagtagaacatgatgtggcccatgcacaccccactgctgctgctgactgccttgatggtggccgtggccgggagtgcctcggcccaatctaggaccttggcaggtggcatccatgccacagacctcaatgacaagagtgtgcagtgtgccctggactttgccatcagcgagtacaacaaggtcattaataaggatgagtactacagccgccctctgcaggtgatggctgcctaccagcagatcgtgggtggggtgaactactacttcaatgtgaagttcggtcgaaccacatgcaccaagtcccagcccaacttggacaactgtcccttcaatgaccagccaaaactgaaagaggaagagttctgctctttccagatcaatgaagttccctgggaggataaaatttccattctgaactacaagtgccggaaagtctaggggtctgtgcaaggcctgtcacactgaccacctcctactcccaccccctgtagtgctcccacccctggactggtggcccccaccctgggggaggtctcctcatgcgcctgcaccaggagacagacacagaaggtggcaggaggcctttgttgctcagcaggaggctctgcccttgctccttccttcttgcttctcatagccccagtgtgcagtgcacactctcccacctcctgcaattaaacagtagcattgcaaaaaaaaaaaaaaaaaaaaaaaaaaaaaaaaaaaaaaaaa

SEQ ID NO: 177 - DNA, 3571 bp, Homo sapiens
cacagcttgggactgctgaggggcaggcggctgcaggctaggggcggctcggagtccgctggccacccagctgagaggagaggcgcccccggggacgcactgagattatgaggctctggcctccactggccactcactcgtgaccctttccaccacggcggagccttccaagcctacctcctgccgtgtggtgatctacctgcagcgggagatgtcgggggacacctgcctgtgcccagcctcaggggccaagcccaagctcagtggcttcaagggaggagggttgggcaacaagtatgtccagctcaacgtgggcggctctctgtactacaccactgtgcgggccctgacccgccacgacaccatgctcaaggccatgttcagtgggcgcatggaggtgctgaccgacaaagaaggctggatcctcatagaccgttgtggaaagcactttggcaccattttgaattacctccgagatgacaccatcaccctccctcagaaccggcaagaaatcaaggaattgatggctgaagcaaagtattacctcatccaggggctggtgaatatgtgccagagtgccctgcaggacaagaaggactcctaccagcctgtgtgcaacatccccatcatcacatccctaaaggaggaggagcggctcatcgaatcctccaccaagcccgtggtgaagctgctgtacaacagaagcaacaacaagtattcctacaccagcaactctgacgaccacctgctgaaaaacatcgagctgtttgacaagctctccctgcgcttcaacggccgcgtgctcttcatcaaggatgtcattggtgacgagatctgctgctggtccttttatggccagggccgtaagctggcagaggtgtgctgtacctccatcgtgtatgccacggagaagaagcagaccaaggtggaattcccagaggcccgaatctatgaggagacactcaacgtcctactctatgagactccccgcgtccccgacaactccttgttggaggccacaagccgtagccgcagccaggcttcccccagtgaagatgaggagacctttgaactgcgggaccgtgtccgccgcatccacgtcaagcgctacagcacttacgatgaccggcagctcggccaccagtctacccatcgcgactgaccagaccctcagggagtcagggcacgggaggccctatctcccatcctgtggaacccgccccattggccaccccatgctgctgctgcctgggtctctgctctagcacccagaggcatgacaggccctgctcagaggtcagagggtctgggcagaggagggaccacattcccctgccttgcccctgagcacttctggagactgcgtcctgtcctatctgctcaccatcacccttcctgcccgacggagctgcttctgctccctggggcatatggactgacccacctcctgctgagaaccttcccctaggccctgtgcagaagggctactgccccttaggcctcagctgggggaaaggcagttctggtgctgtagaggccctggtgcagaaagtgggacgtcttttttcctaaggtgtttaagcacaggcttgataagtttggtttttaaaaaataatctaggaaatgaataattctaaatctagtaatgaggaaactgagcatttcttttgccctccagggtgccaagaccctacatatgacagaacccttggcccttctccatgcctgtgggatctgtttctttaaagcactttgtactgttattcaggaggttgataatctccttgacccatgtctttctaccctaatccccacttccctgcagaatcaatctgagggaggggataaagaggaagcaataaaaaaaaaacatccgacagagcagctctggctttgccagcctggccagcagctcagagtgcaccgaggagggaaggatggctaagctgggaccggcagtcctcacagggtgcctgtgagaaaggacattttacccccacatcatagtcacatcactgactcctaggtctagcacgactgctctttgtgattctcttgagtacccttggcttccagccatgctgtcctcacatacggtaaagccaaagagctgtcacatgggccagaaacatgagccacggcaggaagaccgtggagcccgtgggcactgcatggtgttggctggcatgcccatcagctgaggacagcaaactcccagcagcccctacagaggtggcacatgcttggccacacatctactccctgcccacaccatctatgctcttggttggtgctggctgggatggcggttctgcccagtggtgtctctgagcgcgggatgacaggagcaaccgaagcaccctgaaggccttcactccttgttgggtaactcagccatggagatgccaagcactagccaggaggtgagttcctctttagggctttggttttcattcctttttgtttggcttggccaaaccagaattcagcttatctgaattattttccaaaggaatgctgtcagggagggactgttctgccagcctaacaaagcaacgtagccacgtatagtacccactttctgctctttggagagaacacaggttatcaagttcatctctcttgactactcttatgatagctgatgccacagagcctatgggcaaatgccagacccagggttagacacaaggacctgaagtgacatgacggcgggacaggggaaatgtgactttctaattaggcattttatgttagtcacagtcttgaatgtataaacagcactaagactctcaggtcaggtaccttggtgatcagctactagttcttccagccctcattgaggtaacaagataaagacaaatccacttctttggccaaattcaggctttggctttatgactttcccacagagactggaatgcgtcagcctgagaccactggcctattttctcagctgccctcttgaggtcctttaacactcaaattcccagctccccactgaggtgttgtgatgcttgccttttgacctccccatcccctttagtccctgcttactactttgacattcacatcctcagtgtctcagtcttttttgccgagaaagcacagtagtctgggactgggcatttatcttctctgactgaaaatctctccttggtcttaaggaaaatactaacattgaactcactgacatgatcttagcttctttaatcagactttgtgacttaaaagtttgggggttttctttgaaagtttccagccctattcagaaagcaactcttggctgtgtgcatttttcaactccaagcagcccaggggtaagtaaacaaagtatggatgaaggtcagattttcttgtcagtttctgagaaacctggcagcctgctgttaacaacacaggccagtattgggttttattgaatttggtatgtgaccaaggtcggcctaaaggatggcgcaggtcctgggcaggaaagaatttttcctttatcacataactgtaatatttggttgctcagcataagtgatggaagcaaacactaatttctaataaaattgtgttaaactc

SEQ ID NO: 178 - DNA, 3545 bp, Homo sapiens
tgaacgcatgcgtgctgtggtcgcctagtaaacggggctgctggtgggccgcgtcgaagacatggaccagggctacggaggctacggggcgtggagtgctggacctgccaacacccagggtgcatatggaactggtgtggccagctggcaaggttatgaaaactacaattactatggcgcccagaacaccagtgtcaccacaggcgcaacctacagctacggcccagcctcgtgggaggccgccaaggccaatgatggcggcctggcggccggggcccctgccatgcacatggcctcttacggcccagagccatgcaccgacaattccgactccctcattgccaagatcaaccagcgtttggacatgatgtccaaggaaggaggcaggggcgggagcggcggcggtggggagggcatacaggaccgggagagctccttccgcttccagccgttcgagtcctatgactccaggccctgcctgccggagcacaacccctaccgccccagctacagctacgactatgagttcgacctggggtccgaccgcaatggcagctttggggggcagtacagtgaatgccgagacccagcccgggagcggggctcccttgatggcttcatgcggggccggggccagggccgcttccaggaccggagcaaccctggcaccttcatgcgcagcgaccccttcgtgccccccgctgcgtcctctgagcccctgtccacgccctggaacgagctgaactacgtgggtggacggggcctgggagggccctcccccagccggccacctccgtccctcttctcccagtccatggctcccgactacggcgtgatgggcatgcagggggcgggcggctatgacagcaccatgccctacggatgtggccgctcgcagcctcggatgcgggatcgggatcggcccaagaggagagggtttgaccgcttcggaccagatggcacgggcaggaaacggaagcagttccaactttacgaggagccagacaccaaactggcccgggttgacagtgaaggagatttctccgaaaatgatgacgcagctggtgacttccgctcaggagatgaagaattcaagggtgaggatgaactctgcgactctgggaggcaaagaggagagaaggaggacgaggacgaggatgtgaagaagagaagggaaaagcaaaggagaagagacaggacgcgggaccgtgcagccgacagaattcagtttgcctgttctgtatgcaagttccgtagctttgatgacgaagagatccagaagcatctgcaaagcaaatttcacaaagagaccctgcggttcataagcaccaagctgcccgacaagaccgtggagttcctccaggaatacattgtaaacagaaataagaaaattgagaagcggcgtcaggaattgatggagaaagaaaccgcaaaaccaaaaccagatcctttcaaagggattggccaggagcacttcttcaagaagatcgaggctgctcactgcctggcctgcgacatgctaattcctgcacagccgcagctcctccagcggcacctgcactccgtggaccacaatcacaaccgcaggttggctgctgaacagttcaagaaaaccagtctccatgtggctaagagtgttttgaacaacagacatatagtgaagatgctggaaaaatacctcaagggtgaggaccctttcaccagtgaaactgttgatccagaaatggaaggagatgacaatttaggaggtgaggataagaaagagacacctgaggaggtggccgcggacgtcttagcagaggtgattacagcagcagtgagggccgtagatggggaaggagcgcccgctccagagagcagcggggagccggctgaggacgaaggccccacggacacagcggaggccggtagtgatcctcaagccgaacagctgctggaagagcaggtgccctgtggaacggcacatgagaagggcgtccccaaggccagaagtgaggctgcagaggctggaaatggcgccgagacaatggcagcagaggcagaaagtgcccaaaccagagttgctcctgccccagctgccgcggatgctgaagtggaacaaactgatgcagagtctaaagacgctgttcccacagaatgatgctcatttccctgttccagggaaggcgttgggatgatggatgcgttggtctttctcccttggtttgtaagcagtacaagggcgtgtgctcccagaatatgctgtaatctaattttggtgaagagacccagcgtttcctcctgagcagtgcctctcacggcttgtctcatgcagtcgtgtggcttcttgcccaggtttcaaagctgaagtacattgtccttagcggctgtaacatgtctcttgacagtagtgcacttggaataataaaggttgggtgattatatcttgatgatacattacttgttcaatacagccactgatggaatgcttccttttttatttttttccttaatttttttttttatttggttgggaacagctgaatactaggaatatatcttgctctatagaggatttttttttgtatgtttcaagcttcagcctttaacctatacctttgtagtgcaccatatggtgtgtgactttcacaggacttcgcagcacctggttcacatgtggcactgaccgcgtcacatccacgcactcccaaaggccagaagtatctgaccgacctacgccactggaaacacacccaccgcaacctcaagaaccagactgtgcagagggcattgcgtcccaatctttagtccttgctgaatcagttctctaatattttacctcatttgtgttccacctctagattacttcaggtttttttcctttaaaattagttactaccactcaaatgtatttacaaagagaatttggccaggcacggtgatgcatacctataatcccagcacttggggaggccgtggtgagaggatagcttaagcccaggagttcaagaccaacctggacaacatagcaagaccccatctcttaaaaaaaaaggaaagaaaacttgatgtgattgccataggtggaataatccaacataaattgccatagatagaaggtatctgtaatatatatatatatataaaatgaaatatatgtttcattttagagaaataactattactttagatctttccaaatctgagaaagggaggctagcatgtgttcaaggttagcacgcaacagaatttcctaaaatcagaagaattggaagatcctccccttttgaaatggccctgctgtgtcagtttccctgtggccttttgaactgtacatctcacatgttgggaaacgctggccactgggaaatcattagaaaggaggctgtagaatatttgccgagcctctactgtataccaggggctaactcaccaagcacattctaggaattgggccctgctcatgaggagccttagtggagattccaggtgaatatttatgaaaaagtcaacattagaactgaaaatggaaataaactgcttgaaaagaaaaaaaaaaaaaaaaa

SEQ ID NO: 179 - DNA, 2461 bp, Homo sapiens
atgctgggtacgctgcgcgccatggagggcgaggacgtggaagacgaccagctgctgcagaagctcagggccagtcgccgccgcttccagaggcgcatgcagcggctgatagagaagtacaaccagcccttcgaggacaccccggtggtgcaaatggccacgctgacctacgagacgccacagggattgagaatttggggtggaagactaataaaggaaagaaacaaaggagagatccaggactcctccatgaagcccgcggacaggacagatggctccgtgcaagctgcagcctggggtcctgagcttccctcgcaccgcacagtcctgggagccgattcaaaaagcggtgaggtcgatgccacgtcagaccaggaagagtcagttgcttgggccttagcacctgcagtgcctcaaagccctttgaaaaatgaattaagaaggaaatacttgacccaagtggatatactgctacaaggtgcagagtattttgagtgtgcaggtaacagagctggaagggatgtacgtgtgactccgctgccttcactggcctcacctgccgtgcctgcccccggatactgcagtcgtatctccggaaagagtcctggtgacccagcgaaaccagcttcatctcccagagaatgggatcctttgcatccttcctccacagacatggccttagtacctagaaatgacagcctctccctacaagagaccagtagcagcagcttcttaagcagccagccctttgaagatgatgacatttgcaatgtgaccatcagtgacctgtacgcagggatgctgcactccatgagccggctgttgagcacaaagccatcaagcatcatctccaccaaaacgttcatcatgcaaaactggaactgcaggaggaggcacagatataagagcaggatgaacaaaacatattgcaaaggagccagacgttctcagaggagctccaaggagaacttcataccctgctctgagcctgtgaaagggacaggggcattaagagattgcaagaacgtattagatgtttcttgccgtaagacaggtttaaaattggaaaaagcttttcttgaagtcaacagaccccaaatccataagttagatccaagttggaaggagcgcaaagtgacaccctcgaagtattcttccttgatttacttcgactccagtgcaacatataatcttgatgaggaaaatagatttaggacattaaaatggttaatttctcctgtaaaaatagtttccagaccaacaatacgacagggccatggagagaaccgtcagagggagattgaaatccgatttgatcagcttcatcgggaatattgcctgagtcccaggaaccagcctcgccggatgtgcctcccggactcctgggccatgaacatgtacagagggggtcctgcgagtcctggtggccttcagggcttagaaacccgcaggctgagtttaccttccagcaaagcaaaagcaaaaagtttaagtgaggcttttgaaaacctaggcaaaagatctctggaagcaggtaggtgcctgcccaagagcgattcatcttcatcacttccaaagaccaaccccacacacagcgcaactcgcccgcagcagacatctgaccttcacgttcagggaaatagttctggaatatttagaaagtcagtgtcacccagcaaaactctttcagtcccagataaagaagtgccaggccacggaaggaatcgttacgatgaaattaaagaagaatttgacaagcttcatcaaaagtattgcctcaaatctcctgggcagatgacagtgcctttatgtattggagtgtctacagataaagcaagtatggaagttcgatatcaaacagaaggcttcttaggaaaattaaatccagaccctcacttccagggtttccagaagttgccatcatcacccctggggtgcagaaaaagtctactgggctcaactgcaattgaggctccttcatctacatgtgttgctcgtgccatcacgagggatggcacgagggaccatcagttccctgcaaaaagacccaggctatcagaaccccagggctccggacgccagggcaattccctgggtgcctcagatggggtggacaacaccgtcagaccgggagaccagggcagctcttcacagcccaactcagaagagagaggagagaacacgtcttacaggatggaagagaaaagtgatttcatgctagaaaaattggaaactaaaagtgtgtagctaggttatttcggagtgttatttatcttcccacttgctctctgtttgtatttttgttttgtttttgattcttgagactgtgaggacttggttgacttctctgcccttaaagtaaatattagtgaaattggttccatcagagataacctcgagttcttggtgtagaaattatgtgaataaagttgctcaattagaaaaaaaaaaaaaaaaaaaa

SEQ ID NO: 180 - DNA, 2214 bp, Homo sapiens
gccagccgttcacgcgttcggtcctccttggctgactcaccgccctcgccgccgcaccatggacgcccccaggcaggtggtcaactttgggcctggtcccgccaagctgccgcactcagtgttgttagagatacaaaaggaattattagactacaaaggagttggcattagtgttcttgaaatgagtcacaggtcatcagattttgccaagattattaacaatacagagaatcttgtgcgggaattgctagctgttccagacaactataaggtgatttttctgcaaggaggtgggtgcggccagttcagtgctgtccccttaaacctcattggcttgaaagcaggaaggtgtgcggactatgtggtgacaggagcttggtcagctaaggccgcagaagaagccaagaagtttgggactataaatatcgttcaccctaaacttgggagttatacaaaaattccagatccaagcacctggaacctcaacccagatgcctcctacgtgtattattgcgcaaatgagacggtgcatggtgtggagtttgactttatacccgatgtcaagggagcagtactggtttgtgacatgtcctcaaacttcctgtccaagccagtggatgtttccaagtttggtgtgatttttgctggtgcccagaagaatgttggctctgctggggtcaccgtggtgattgtccgtgatgacctgctggggtttgccctccgagagtgcccctcggtcctggaatacaaggtgcaggctggaaacagctccttgtacaacacgcctccatgtttcagcatctacgtcatgggcttggttctggagtggattaaaaacaatggaggtgccgcggccatggagaagcttagctccatcaaatctcaaacaatttatgagattattgataattctcaaggattctacgtttgtccagtggagccccaaaatagaagcaagatgaatattccattccgcattggcaatgccaaaggagatgatgctttagaaaaaagatttcttgataaagctcttgaactcaatatgttgtccttgaaagggcataggtctgtgggaggcatccgggcctctctgtataatgctgtcacaattgaagacgttcagaagctggccgccttcatgaaaaaatttttggagatgcatcagctatgaacacatcctaaccaggatatactctgttcttgaacaacatacaaagtttaaagtaacttggggatggctacaaaaagttaacacagtatttttctcaaatgaacatgtttattgcagattcttcttttttgaaagaacaacagcaaaacatccacaactctgtaaagctggtgggacctaatgtcaccttaattctgacttgaactggaagcattttaagaaatcttgttgcttttctaacaaattcccgcgtattttgcctttgctgctactttttctagttagatttcaaacttgcctgtggacttaataatgcaagttgcgattaattatttctggagtcatgggaacacacagcacagagggtaggggggccctctaggtgctgaatctacacatctgtggggtctcctgggttcagcggctgttgattcaaggtcaacattgaccattggaggagtggtttaagagtgccaggcgaagggcaaactgtagatcgatctttatgctgttattacaggagaagtgacatactttatatatgtttatattagcaaggtctgtttttaataccatatactttatatttctatacatttatatttctaataatacagttatcactgatatatgtagacacttttagaatttattaaatccttgaccttgtgcattatagcattccattagcaagagttgtaccccctccccagtcttcgccttcctctttttaagctgttttatgaaaaagacctagaagttcttgattcatttttaccattctttccataggtagaagagaaagttgattggttggttgtttttcaattatgccattaaactaaacatttctgttaaattaccctatcctttgttctctactgttttctttgtaatgtatgactacgagagtgatactttgctgaaaagtctttcccctattgtttatctattgtcagtattttatgttgaatatgtaaagaacattaaagtcctaaaccatcaaaaaaaaaaaaaaaaaaaaaaaaaaaaaaaaaaaaaaa

SEQ ID NO: 181 - DNA, 3625 bp, Homo sapiens
ccgctcgccgtccttgcaggctctgccgtcggaaagccgctcattctcgcttccccttccctttcccggctcaagtccttcctctctctttcctttctttccgcctatcttttttctgctgccgctccgggtccgggccattttccgggccgggcgcactaaggtgcgcggccccggggcccagtatatgacccgccgtcctgctatccttcgcttcccccgccccatgtggctgcggggccgcggcggcgctgcccactatggcccggaaagtagttagcaggaagcggaaagcgcccgcctcgccgggagctgggagcgacgctcagggcccgcagtttggctgggatcactcgcttcacaaaaggaaaagacttcctcctgtgaagagatccttagtatactacttgaagaaccgggaagtcaggctacagaatgaaaccagctactctcgagtgttgcatggttatgcagcacagcaacttcccagtctcctgaaggagagagagtttcaccttgggacccttaataaagtgtttgcatctcagtggttgaatcataggcaagtggtgtgtggcacaaaatgcaacacgctatttgtcgtagatgtccagacaagccagatcaccaagatccccattctgaaagaccaggagcctggaggtgtgacccagcagggctgtggtatccatgccatcgagctgaatccttctagaacactgctagccactggaggagacaaccccaacagtcttgccatctatcgactacctacgctggatcctgtgtgtgtaggagatgatggacacaaggactggatcttttccatcgcatggatcagcgacactatggcagtgtctggctcacgtgatggttctatgggactctgggaggtgacagatgatgttttgaccaaaagtgatgcgagacacaatgtgtcacgggtccctgtgtatgcacacatcactcacaaggccttaaaggacatccccaaagaagacacaaaccctgacaactgcaaggttcgggctctggccttcaacaacaagaacaaggaactgggagcagtgtctctggatggctactttcatctctggaaggctgaaaatacactatctaagctcctctccaccaaactgccatattgccgtgagaatgtgtgtctggcttatggtagtgaatggtcagtttatgcagtgggctcccaagctcatgtctccttcttggatccacggcagccatcatacaacgtcaagtctgtctgttccagggagcgaggcagtggaatccggtcagtgagtttctacgagcacatcatcactgtgggaacagggcagggctccctgctgttctatgacatccgagctcagagatttctggaagagaggctctcagcttgttatgggtccaagcccagactagcaggggagaatctgaaactaaccactggcaaaggctggctgaatcatgatgaaacctggaggaattacttttcagacattgacttcttccccaatgctgtttacacccactgctacgactcgtctggaacgaaactctttgtggcaggaggtcccctcccttcagggctccatggaaactatgctgggctctggagttaatgacaactccccaaatgcagagatttacactaacttccattctcagtttccttgtttcttttgattttttttttcctaattgtgtgaggctcttgtgttttagtgggaacaccaaagtttgcctatagtttaggcacttaataggaagaagctctgtacagaaatctgaaagttgttttgctttttgttttcccctttggtaatcaaaattttactatcttttattatttctggcttttcaaccaaacattgttgctaatccctatttttctttaagtgacacacattctcctgtctctggcttcttcaggctgaaatgacatagtctttctcacccttacttcactcttgagaggtagggctcctttataattacatggttgctctcagactttctgtgaaagtttgggagctgtgtgtgtctgtgtgtgtgtgagagagagatcttgtctgcgtgtgtgtgtgtgatcttgtgtgcctgtaggtactgtgtgtcactgaaattacctggagtgaggattacttgtaattaaaatatttataaaagaaacaactttattcacagagtccagctttgggactagtctgtatcttgttttttaagtctaacaacactgataataggaagtaaaaacagaaaggaaaagaaattaccactgggaaaatctttttagttagattgtaggcttcctggggcctcccatgccaggactgcaaagtgatccagccctacctgtcttcccacctgtgtgtcccccgtgtgggaagttggtgtcacttccccttcccaccctcacatctgcttagccagtagccacacccctaaaacatcagactcaccatccaggtgcagctccagaggctacaaaaggcttcatgggacttgaatccccatcctagcttctctctccttcccctcaagacctgatctggttttaaggggcctggagctgggagtctcaagtctgctaagattcacatccatagcccccatggctttgaggagaatcctctctgccattcttccaatctccccagtgggttttgctattattttctaaattgggttaagtctaagaaggtgggggtgagcagggggtttatctgtgtgtagtgagtgcttcatgtgtggaatattcattttcttactgcagtgggacttggggttgaagccacccctcctactctgttggcttagccctgagatggtgacaggctggcctgcagtcagcatcattgtgcatgtgacagcatcaatgtgattagtaatttgtctgttcctcccttgaactgtctgtttagtctgaggtttttaaacttgcaggcagctgactgtgatgtccacttgttccctgatttttacacatcatgtcaaagataacagctgttcccacccaccagttcctctaagcacatactctgcttttctgtcaacatcccattttggggaaaggaaaagtcatatttattcctgcaccccagttttttaacttgttctcccagttgtccccctcttctctgggtgtaagaagggaaattggaaaaaaaattatatatatattctccttttaatggtggggggctactggagaggagagacagcaagtccaccctaacttgttacacagcacataccacaggttctggaattctcatcttcgaacctagagaaataggtgctataaacagggaattaagcaaaatgctggatgctatagatcttttaattgtcttaattttttttctattattaaactacaggctgtagatttcttagttctcacagaacttctatcattttaaactgacttgtatatttaaaaaaaaaatcttcagtaggatgttttgtactattgctagaccctcttctgtaatgggtaatgcgtttgattgtttgagattttctgtttttaaaaatgtagcacttgactttttgccaaggaaaaaaataaaaattattccagtgcaaaaaaaaaaaaaaaaaaaaaaaaaaaaaaaaaaaa

SEQ ID NO: 182 - DNA, 3081 bp, Homo sapiens; identical to SEQ ID NO: 172

SEQ ID NO: 183 - DNA, 3780 bp, Homo sapiens
ccgcggggcgttgtccggagagctgcgaggccggggttcccagggttcacgccacactctaggaagtgcctgagctagtgagctggccaacgagctccgcgggctgggaccatgggctgcttcttctccaagagacggaaggctgacaaggagtcgcggcccgagaacgaggaggagcggccaaagcagtacagctgggatcagcgcgagaaggttgatccaaaagactacatgttcagtggactgaaggatgaaacagtaggtcgcttacctgggacggtagcaggacaacagtttctcattcaagactgtgagaactgtaacatctatatttttgatcactctgctacagttaccattgatgactgtactaactgcataatttttctgggacccgtgaaaggcagcgtgtttttccggaattgcagagattgcaagtgcacattagcctgccaacaatttcgtgtgcgagattgtagaaagctggaagtctttttgtgttgtgccactcaacccatcattgagtcttcctcaaatatcaaatttggatgttttcaatggtactatcctgaattagctttccagttcaaagatgcagggctaagtatcttcaacaatacatggagtaacattcatgactttacacctgtgtcaggagaactcaactggagccttcttccagaagatgctgtggttcaggactatgttcctatacctactaccgaagagctcaaagctgttcgtgtttccacagaagccaatagaagcattgttccaatatcccggggtcagagacagaagagcagcgatgaatcatgcttagtggtattatttgctggtgattacactattgcaaatgccagaaaactaattgatgagatggttggtaaaggctttttcctagttcagacaaaggaagtgtccatgaaagctgaggatgctcaaagggtttttcgggaaaaagcacctgacttccttcctcttctgaacaaaggtcctgttattgccttggagtttaatggggatggtgctgtagaagtatgtcaacttattgtaaacgagatattcaatgggaccaagatgtttgtatctgaaagcaaggagacggcatctggagatgtagacagcttctacaactttgctgatatacagatgggaatatgaagtgcaatgtggaaccaggacttggtattaagcctttcccaacttgtgaatatagaatttgataatacacttttgtgtattagcaatggtttttactaatgctaaaacttttaaagtttattttttaataaattgttgagtattacatcatttacttgaggttcaaaaataattcattttaaattaagtagttttaatcagcttaaaagctatttaacccattttaataagcttgcagttttgtttctctgcatatgatattcttattagaaaacagaagtagctaaaagtttattattttaatcctatttaaatgttctttcaaatctctaataatttaaactttcctcagtgctccatgatactttttttgagactccatatcattgcttattttacctttttcaatttagagggatttgttactagtcgatcaattagaatgaacctatgcacatttttatgtacacatatccagttatataattgcttcctagttgcattatatggcaaatgagattttgtacatggagttgacataatactttgtaaattgaattttttaaagaaataggcatttgataaccagcttggcaagtaactctactaacagatgttggtatagctatttaaagactacttcgtaagtagtatgattatttgaataaattacacattgtttagttttttaatacaactgctatatgactcttctgcttcctgataagaaaaggtatatgcaatgctaaaactgtagaagcccaatcaccagcagtttttaaaaaggtgataacttttattagctcttgtgggctatcaagagaattagaacaaaaccttgtgacttttaggtaagaaataggcatgatgataagctatgcagattattaaaaagcttgatacatttgatttttcattagatatgccattcatatcaagtaatgttcaagtatgataaaattattttggttgctttaaagcactgtttcccaaatctacctgatcataataatttaccaggaagcagaggagagctacttgtttaaaaatccacattcttggacccaatcctcagatgcacggattcagtcttcaggggaaactctgttttaaggggtatgttgtaatctaaagtaattggttcaggaggtgtcaataggttgaacttgtgagaaggcactgaatctgccatccacatcacatatagcagctattatgaaatcagctttcataggcctatttttaaaaggaatctgaaatttaattctattttgataaaactaagactgaaaataaccacttgtaaacattcctatgattgttactaaaatgtattttcatgtttaaaatgtttttggatatttttgggttaataactactacattgaattgcatgttaaggtgcagaaataatacattaaaagattttcactttaaattaattagtaatattgagcgctcaccctgtgcgtggccttgtgctaaccattagcactgcatcatttcaattcttttataagggcattcaatactacaaaatcaacatgatttcataaggtgcaaataaaagttggtgacagatttaatataattttgatcacaatttacaaatgatctttgcaaatagtggtcagacggcattagtttttcccttagttaagctaaattaaagggactccatcctgttatgattatattattattattattattattatttttgaggtggagtttcactcttgttgcccaagctggagtgcaatggcgcgatctcggctcaccacaacatccgcctcctgggttcaagcgattctcctgcctcagcctcctgagtagctgggaatacaggcatgcgccactacacctggctaatttttgtatttttagttgagatggggtttttccacgttggtcaggctggtctcgaactcctgacctcaggtgatccgtccacctcagcctcccaaagagctgggattacaggtgtgagctaccgcgcctggccatgatgatattattaaacaccattattcacatttcaaataataacaatactttttgtttttcaaaaataaaatgcaatgttatataaagctataaactaagttctttatgatatttgagcaacaactcaggaatataacatataagggagatgttaatttaaaaatttccactacacttattatctattaaccaaagcttaaaattttgtattcttctgttagataagaccttttacccatttaatttgtctttaaggacagtcatttggcttctgaatgtttgaaacgattttaaaaaataagtagtgctatggttgtttctataattctaacctttgatagtaatcagaatgtattacatttcatttctgaatagcttttgaatttatgaaaaattattaacaatgaaaaattggtaattttattaagttatatgtgtttaaatattatattagcttatttctcttgcattaatagtactgctgtttttgttttgcttctttatatttatgtctagcttttatatgtaatttatctagtgtttataaaatgtgatttgtaataaatgttgttaaaatgaaaaaaaaaaaaaaaaaaaaaaaaaaaaaaa

SEQ ID NO: 184 - DNA, 4317 bp, Homo sapiens
agcgggtatctatggccgggctcaggcggctgctggggagccaggagaccgcgcgggacggcggatgaggcgcggcggctgcggcccagggcacctcccctctggcttcccgaacccggccaggtccgacccgagggggaggatggaaacacctgccgcgctctgagccccccagaagagaacacccttcccgccatatcaccccacggtcctgcggaggccaccgcctggtccccccaagtctccatcgcgcagcgtggggccgagaggaatagtgagcgatggcggaaaacctgaaaagactggtctcaaacgaaactttacgaacgttgcaggaaaagctagacttctggctgaaggagtacaacacaaacacgtgtgatcaaaatctaaaccattgccttgaactcattgagcaagttgccaaggtgcagggacaactctttgggatcctcacagcagcagcccaagaaggaggacgtaatgatggtgtggaaacaatcaagtcacgccttttgccttggctggaggcttcctttactgctgcttccctgggaaaatctgttgacagcaaggtcccctctctgcaggacacgtttgatagggagagacataaagatcccagtcctcgggatcgggatatgcaacagttagactctaatttgaactcaacccggagtcaatgcaaccaggttcaagacgatctggttgaaactgaaaagaatcttgaagaaagcaagaacagatcggccatatcccttttggctgcagaggaggaaataaatcagctgaaaaagcagcttaaatctcttcaagctcaggaggatgcccgccacagaaacacagatcagaggagctcagagaataggcggtcagagccttggagcttggaggagcggaagcgtgagcagtggaactcactcaagcagaatgcagaccagcaggacacagaagccatgtccgattataagaaacagctccgaaacctgaaggaggagatagctgttctgtctgctgagaaaagtgcactccaaggaaggtcctccaggagccggtctcccagccctgcccctcgcagccgtagctgcagccgcagcagatctgccagcccctccaccgctgtcaaggtcaggagaccgtccccaaaccgctccaagctgtccaatgtggcgcgcaaggctgccctcttgtcccggttcagcgattcctattcccaggcccgcctggacgcgcagtgcctgctgcggcgctgcatcgacaaggctgagaccgttcagcggatcatctacatcgccacagtggaggcattccatgtagcaaaaatggcattcagacacttcaagatccatgtgagaaaatcgttgacaccatcttatgtggggtcgaatgactttgagaatgctgtcttggattatgtcatttgtcatcttgatctatatgattctcaaagcagtgtcaatgatgtgatccgagccatgaatgtcaatcccaagatttcattccctcctgtcgttgacttttgccttctcagtgacttcatccaggagatatgttgcattgcctttgcaatgcaggccttagaaccacccctagatattgcatatggagcagatggagaagtttttaatgattgcaaataccgccgcagctacgactcggatttcactgctcccttagtcctctatcacgtgtggcctgctctcatggagaatgactgtgtcattatgaagggagaagctgtcaccaggagaggggctttttggaattcggtgcgatctgtaagtcgttgtcgaagcaggagtttaagtcccatttgcccccgtagccaaattggtttaaacacgatgtctcgaagtcggagtccttctccaataagatgtggattgccaagattttaaaagcaccagacctgctcctttgacccagtgcgtggaaacagctgctttctccagtgccgccatctgtcttctgtgtctgcctcagacctcacttaagataatgtcaaaaggcaattctgtgtatcaccccacacagagagttaaatgttttggcttggcgcatttgtaactttagatatattgcattctattttattttatagatactaattccattaatttcataaaaatgattgtataggcatttaggatcatattcattcgaagcaaagtccgttacaaaggttcaagatttccatctcaaaacactacgctcttttatgggaactgtgtgaactgaagtggaaagcatctaccatgctgaggctaaaagaaaagatgaatcattttagtttgcagatggatcgtaaatataattgttggtatcagctttagctcaaaaccaatattaggtgttttaatttccttttaaggtttggaagacagccctaatctcaggttggggagctcatgttagtagcagtgacttaaggctaagtgtagaagataatttaagatacattttctttatatattagccaacaaattatatttattggttggcttgcttttccgttctgattttgagagtgcccagtttggtttagttgaccaatgaatgtcaaagctacttagttgagagaatttccttgttcataaatgtagagcagtgatttgattagaagccagctttgagataaatgttaattacctcatgcatatctcctgggaatatttcaaactgttttaatgcatgtgttatatataaaagtttcttgggacatgctcttcacctgttctacctagttatttgcaaattcagacctcctattgaactctgtctgaccaaaactacttaaactcaaggcccaaaactaggggcaccatttactgattttaaattgagtatatatcccttgacttcttcactgtcaaatacttttgaaacttcacgttcaagataagaatggaatgttgctttcttgcaataagtaatgttctttctgcctttttttcacttttaagtcagccttaaacacatgcctcacaaacatctactttctccacatacctttgagagagacactgaattggcctcagctcagttttgcataagcttagtgccagaaccagcacctgatgcttttcaggtgaaaataaaacaaacagcttctctaaagcatcttacccctgtgctggaggtttgagggacctcttcagtgcctgccccttgagtctaatggtcaccacctcattctgaagtatgagttgaattttttgccctctttgcatatttacattagtcatcactttgaagcaatgcagtgtgctggaaggagcactatctgcctaggtaactgctagtcatgacctggtcatcagcttgctttgtggcactgagcaagttacttcacttctctgagccttggttttatcatagggtgaggaggttggatacaattagtgccccccttaaccctgcagactcaatgttcccttttataacaagtattttattctgaatatgaaatgaaaattaaagttaatataatcatctatgtgcatgtataattttaagcagtgaacatagtaccctaactataatataaagcagaaaaaaaggcaacttttaataaaataaaatgtatttcaataaaaaagcttgggtataaccaccctagaagataaaattaagtcattagatggctgaacctgcatgtagagccaccagctacaaatgaaaatcaatgtgtgtattggcaacagaaaatcacggtgttgtcattggatgtgactttctgaagtggtgggcaattcttgttaatgttttaaacaaaaaaaaaaacaccttacagtcttgccctgatttacacagcagtcacattcctggaaaattcaagtgtttattaaaactatgcaacagttactgtgtgttatacgttgaaaggtcttcactaatatctcactaagtaatgagaatgcctacatatcagaattttttttttcaggagccaagcacatatactgatttggaaaaaggcacaggtagctcagtttatttgctttctaccctgcctggccacttgctgtttcttcagtttctaatttgagctgtaactacacaaggaaagctaaatagtctggaaaatttttggaaagaatccacaaagccaaaggagactggcctatactcattttatctggggatgtaccttacccttagagactttgaaaaatgtgaagctcttattttgtaacctgggtaaatgttagtttctagattttcggcttaacatctaataataacatttaaaaagtgcttttgtaactattagttatttgcaataaaatgctttccttctacaaaaaaaaaaaaaaa

SEQ ID NO: 185 - DNA, 4259 bp, Homo sapiens
actcgtctggcaccagcccgggccgcgcccgggacctcatttcggacctcggtttccctttgcgtggggctcgcagctgccaccgcttccccgcggagcatggggctgcctcgccgggcaggggacgcggcggagctgcgcaagagcctgaagccgctgctggagaagcgccggcgcgcgcgcatcaaccagagcctgagccagcttaaggggctcatcctgccgctgctgggccgggagaactccaactgctcgaagctagagaaggcagacgtcctggaaatgaccgtgcgcttcctgcaggagctgcctgcgtcctcatggcccacggcagcgcccctgccttgcgacagctaccgcgagggctacagcgcctgtgtggcgcgcctggcccgcgtgctgcccgcctgccgtgtcctggagcccgccgtgagcgcgcgcctgctggagcacctgtggcggagagcggccagcgccaccctggacggcgggcgcgctggggattccagtggcccgtctgcccccgccccagcgcccgcgtctgccccagagcccgcatccgctccggtgccctcgccgccctcgcctccctgcggccctggcctctggcggccgtggtagcccctcggccgatccacagaccctgccgactgcttgggaccttggggcactggacaggttgaagctcttggtggcggctgctgttcccatcattaggggccagcccagtacccacacccaggccggaagccggctgtttgtgactggcgtggcagactgaaagccctggggctggggctcggctcagggaataaaaggagcgtccctgcttcacccccaacttggctggagaagaaaggacaagaggcagcagggtgaagaagaagccccccatcccagctggtggagatagttctggaactggaccccgcagctgcgtgggcagccgacacacccaccccagcactggcaccagaccagagccagagccaggacctgggcaaagtgcagccgtgcaccctgcctggtcactgctctcccagccctgcctgggcctacctcctgcccagctctgcttgggaccctctgggcatgcagcagcagtagcctaagggctctggtcacttccagggctctacagggcagcagagcagagcaaaagggtgcatatgctgggagctgtcacctccactcctaggcttttctgcctagagcagaattataggggcagtatacatccaggggtctgtgcggtggggctgggggattccttaagtgactttgggaaggatttgttttcccgagcatcaatttcacacctgggcattgcaccccaggctatgcagtctttcagtgtgaggaaggggcagaacaagaatgaggcggccccgtggcctcaaggaagcttgtggctttggaggatctgactccagcagagtctgtgccaatgtggggtgagcagggcccctgccatggagcagcaggaatttgagggatggagcaggttaaagaatgggaaacatcttcacttgtttttttttcttgcaaactactccctgctactcattgagactggttactggaagcaacttgttaagatttttctttctgggcgggcgcggtggctcacgcctgtaatcccagcactttgggaggccaaggcgggtggatcacctgaggtcaggagttcgagaccagcttagccaatatggtgaaaccccgtctctactaaaaatacaaaaattagccgggtgtggtggcatgtgccagctactcgggaggctgaggcaagagaatcacttgaacctcggaggctgaagttgcagtgagccaagattgagccattgctctccagcctgggtgacacagcaagactctgtctcaaaaaaaattttttatttctttcttttccatggaggcctagagtccctgtgaaggctaggaaggggctgctgatcccaggagtgcccacgaggagtggggggcactgttggcccataatcaggcaaacacccatcatttcatgggggattcatgaaatcatagtcaggcaaacacccgtcatttcatggctaagcatttgcagaaggtggaggattctcccccgagtccccaaatcagcagcctgtgctagggaccagagcaccgggggcaagaagacagaaccaatgtgggagtggggatggtcactaaatctgactgtgccacacaagcccatgatgaccttggcactggtttgggtggcaggatatgaaggaagctgtaggcattattgaaaaaatcattgttcagccaacagggtgaggctcccagcaaggccgtgccatcttcccacctccctgtgcccagagggttagactgtaagctcccggagggcgaggctggggctgagcgtgcctccacgtccccaaggcacagggtgcacagtgggtgctcactgaatatattggactagtgagcagaggatgagaggactaccctgtaatgagccttggacagtctggcatttgccttaactcccactcccatgccctgggatcactgttggatatttactccatgaggacaaatactggggaggtgtggagaggagggagggcaggttcctcttactttcacccattgctgagaatgagcgcctgttggcactgcctttgtgagcctccgggagcagttaacctgcggcccaagcccgcctaggactccacatcaggcaggcacaggactggccccttgtcctcataaaaactctcagtacagcttaaactctgtaagatctaaccagccaggaggaccctcgcttcctctccgccatgcttgccacctcttgcttctgagagtccatctcagttcgcagttctgtgacttgcattgacctggctccaatcaagctacaactcaagcagtcacggggagaaggattgtagatgggccagtgactcacagggtcaggcactcgggggagcctgagtcaggaggtcagtgggccctggaagggagggggcaagcctgggtgggtaaggttctgggccccaggcaggaaggcagagtttctccgcaggggtgtgtgcaagagctagctgcgcagaaggtctccgctggctctccaagccgggcttgtgaaataggaacgccaacatcctcctccacaggcagtggcaggcacctcctcctcaggtgccccccaagccctatctgatgggcaaaggtgaacgcagggcggtgggcttttcctgtgcagagggagactgattcaaagggtcatttatgacctttcacaagtcccacatcctgcccaatggccaggtcttgggatgctgttgcaagatggttctgtgactccatgtgactgtctgatgattgccccagctggggaaaaggctcccatgtctctttctcataaaaccagtgggcaaggccgggcgcagtggctcacgtctgtaatgccagcacttcgggagaccaaggtgggcggatcacctgaggtcaggagttcaagaccagcctgaccaacatggtgaaaccccgtctctacaaaaatatggaaattagctgggcatgacggcgggtgcctgtaaccccagctacttgggaggctgaggagggataatcagttgaacccaggaggtggaggttgcagtgagccgagatcgcgccactgcactccagcctgggtgacagagcaagactccatctcaaaaacaaacaaacaaaaaactagcgggtgaaatgattcagtgacctaaggacagccagagcactaagctgctgggaacccatctgtgctgaaatgtagatttcccaggaaactcaggcttgggacaggcgcctacctgctcctcgggcaccaggtgattaggagaggtcgaatctcatttccacgtgagtgaggataaagactgggctgccaaggaggactcctcataaacattgacaaattgctctgccccgcctgtgatcccagacgactcctgcagtctgggatcctgagtgtcctgtgggttcatctcggatgggcgctgcataaacagcctgcagggaacgtctgggagaaccagcttcacaacagatataataaggaagaagtttgaaatattgcaagaattgcgaaagtgtgacacacagatacaaagtgggcacatgctcgtgggaaaatgttgccaatagacttgcttgactctggagttaccccgaaccttcaatttgtttaaaaaaaaaaaaaaggcaatatcttgacgtgcaataaagtgaactgcaat

SEQ ID NO: 186 - DNA, 2550 bp, Homo sapiens
gctcggcgtcgcctcccccgaccgccccctccagggcccctcctccgtgccgcggccaggctgcccggccggcggcgcgctggaaatatgaagagacgctgcagctgcggtggcggtggcggccactgcagctcagagcggcgcacgcggcggccggggcgggacgcggggccgggcgcggagaagtcggggcgggcggcagagaggccgggacccggcctggcccggccgcacccggccggaggcggagggcagagcgcgcgcccagttgcccgggcaccaaatcggagcgcggcgtgcgggagggcccagagcaggactggaaatgtcctggccgcgccgcctcctgctcagatacctgttcccggccctcctgcttcacgggctgggagagggttctgccctccttcatccagacagcaggtctcatcctaggtccttagagaaaagtgcctggagggcttttaaggagtcacagtgccatcacatgctcaaacatctccacaatggtgcaaggatcacagtgcagatgccacctacaatcgagggccactgggtctccacaggctgtgaagtaaggtcaggcccagagttcatcacaaggtcctacagattctaccacaataacaccttcaaggcctaccaattttattatggcagcaaccggtgcacaaatcccacttatactctcatcatccggggcaagatccgcctccgccaggcctcctggatcatccgagggggcacggaagccgactaccagctgcacaacgtccaggtgatctgccacacagaggcggtggccgagaagctcggccagcaggtgaaccgcacatgcccgggcttcctcgcagacgggggtccctgggtgcaggacgtggcctatgacctctggcgagaggagaacggctgtgagtgcaccaaggccgtgaactttgccatgcatgaacttcagctcatccgggtggagaagcagtaccttcaccacaacctcgaccacctggtcgaggagctcttccttggtgacattcacactgatgccacccagaggatgttctaccggccctccagttaccagccccctctgcagaatgccaagaaccacgaccatgcctgcatcgcctgtcggatcatctatcggtcagacgagcaccaccctcccatcctgcccccaaaggcagacctgaccatcggcctgcacggggagtgggtgagccagcgctgtgaggtgcgccccgaagtcctcttcctcacccgccacttcatcttccatgacaacaacaacacctgggagggccactactaccactactcagacccggtgtgcaagcaccccaccttctccatctacgcccggggccgctacagccgcggcgtcctctcgtccagggtcatgggaggcaccgagttcgtgttcaaagtgaatcacatgaaggtcacccccatggatgcggccacagcctcactgctcaacgtcttcaacgggaatgagtgcggggccgagggctcctggcaggtgggcatccagcaggatgtgacccacaccaatggctgcgtggccctgggcatcaaactacctcacacggagtacgagatcttcaaaatggaacaggatgcccgggggcgctatctgctgttcaacggtcagaggcccagcgacgggtccagcccagacaggccagagaagagagccacgtcctaccagatgcccttggtccagtgtgcctcctcttcgccgagggcagaggacctcgcagaagacagtggaagcagcctgtatggccgggcccctgggaggcacacctggtccctgctgctggctgcacttgcctgccttgtccctctgctgcattggaacatccgcagatagaagttttagaaagttctatttttccaaaccaggattccttactattgacagatttgctttaccaaaagaaaagacatttattcttttgatgcacttgaatgccagagaactgtccttctttttctcctctccctccctcccagcccctgagtcatgaacagcaaggagtgtttgaagtttctgctttgaactccgtccagcctgatccctggcctgagcaacttcacaacagtaattgcactttaagacagcctagagttctggacgagcgtgtttggtagcagggatgaaagctagggcctcttatttttttctcttaattattattatatttctgagttaaacttagaagaaacaactatcaagctacaacttttcctgccattttcctgtggttgcagcctgtcttcctttgaaattgttttactctctgagttttatatgctggaatccaatgcagagttggtttgggactgtgatcaagacaccttttattaataaagaagagacacaggtgtagatatgtatatacaaaaagatgtacggtctggccaaaccaccttcccagcctttatgcaaaaaaaggggagaatcaaagctttcatttcagaaatgttgcgtggaaaagtatctgtaattaaagtttcgaagtaatttaacctaaaaaaaaaaaaaaaaaa

SEQ ID NO: 187 - DNA, 1272 bp, Homo sapiens
ggccgggcggcccaggggctgccgcgggactcggggcgcagccgagtggctgcaggggtggagtgggccggacgagccgcggggcccgggtgccgcgggttcgaggccgggccccgcgcgaggaggccgcgccaccccgggggagctgcccggcagcgagtttgccccgctgccgaaagaaggcgggagccggcaggggccttcgaaaccccctggcaacccaggcccggagtccttggggagcggctgtttcctgggacgccctcccggacacccccgctgcagggttacggttctgggcccccggcagaaggctcctccgggtgacccccggcggggccctgcgagccgcgggagccgaccccggggcctcgagccgggaggaagggggcttccggaggcggagggccgggggccgagggagccgggcctctcggacgcggggcagggcagcgcccgggctggagacggactctgggaccctcggctgcgggggtctcagcgacctgccccgcggcaagcgcggccgcggagtggcctaccggggaccctcccccagagggaccggcccggggcggggagatgaacggcttcagcacggaggaggacagccgcgaagggccccccgccgccccagctgccgccgccccgggctacggccagagctgctgcctcatcgaggacggcgagcgctgcgtccggcccgcgggcaacgcctccttcagcaagagggtccagaagagcatctcgcagaagaaactcaagctggacatcgacaagagcgtaaggcacctatatatctgtgattttcacaaaaatttcatccagagtgtccgaaataaaaggaagaggaagacaagtgacgatggcggagattctcccgagcacgacactgacattcctgaggttgatctgttccagctgcaggtgaacaccctacgacgttataaacgacactacaagttgcagaccagaccaggcttcaataaggcccagttagcagaaactgtgagtcgacacttcaggaacatacctgtgaatgaaaaagagacccttgcctacttcatctacatggtgaagagtaacaagagtagactggaccagaaatcggagggtggcaagcagcttgagtgaggatgaagcacatcttaaaggaatgaagtgtaatgcttgatgcacaggtgatatctactacatttaagcccataaagactgttaaatattattgtaaataaaaaagtttgaatgatgaaaaaaaaaaaaaaaaaaaaa

SEQ ID NO: 188 - DNA, 10624 bp, Homo sapiens
ggggggacgaggcaggggaagaacctgggaaggaaaaccagtagcatcagcagcagcagtagcagcggcggtggcggctaaggcagctcgaacagctgcggcgacggcgacagcccagccttgactgcgaccgcgctagctacagcgcctgctgcctgagcccgccagcgacgtgcgcctcgggagtcggcctgtgaggttggacagcatttggacttggaatgaaacaataagaggttatattcatggataaccaacaagataaggctattgttgcctcagccaacggagaaaacactctgattaatggggtcaaagaaaatgactcagaggaccaggatgtggcaatgaagtcatttgcagctctagaagctgctgcacctatccagcctacaccggtggcacaaaaagagaccctgatgtatcccagaggtctcctgcctctaccctctaagaagccctgtatgcagagcccgccctctcctttgggcctgattgaagcacccgaacatgctgctaatagtgcttctgtgaatgccatctccctcacatctggcattgcaaaaggcctgaacacatggtcacttcccaatgaatgtgagaaagctccatttgccataatggagcctgcaggcatgtcagctctgaatggggactgtctcatgcagccaagtcggacttgcttaggctgcttcatggaatccaaggatgcagtagatcctgagccagggatcagtctgaaagttggtgatctaaatagggattatgaaacgtgtgcagtctctgatatagggattcagtgtattaatgctggagaaaatatgaaatatggagagcagctgctctcagaccagctcctaggcttccccctgcataagtcaagggcaggagacagacgagaaactgagaaacctgacattgacttggaggatccggctcagaaaagctattatgaggcattactgttagacaagtgcaatacagaagaagctttgcttgcaaattccaatcaggattggggttacttcgagacttttattagtgaaagtaagattgaactgcttgacctctgttccaaaaatgagctgtctgtcaacctattctctgaagaagatgtggataactacatgtttgatgatgatgaatcaacactaggcagtgatgtctgctccctgaaaattcgatatgaatcctttcaggacaatgttcgagacaagactactcttttgatgcaggaagatgcccaattcaacttttttcccagcgtctttactacctgccccaagcgagagtctaagagtggggccctgaagcagagcagtgatttttcccaattcaaggtccctgatgtgagcatcatctggggggaggaagataaaaacttggacaagaagaaaggcaaagaggaaggacaggaagacaaaggtgtagagaagaaagatggaaaggataatggagaaaagcctgccttaaataaaccatgcagtgggactgaagtagagcaacttaagaatccaaagcagggccatcttgctaattccctggagacatcagggagtttcagtgatgatagttccttcattgagatctcatatgatgctatgggtgagatcaaggactgtagtcgctatatggctcgggacactaattctggcagctcctcctcccaacagaactatgggctgcgagccaagagaaaagtcagatacagtgaagattatctatatgatgttgactcactagagggtgaaaaagtaaatgagaggaaggaatggctgccagttggttccaaagaggaagatgatgatgaatggtgtcccaaaaagagaagaaaagtaacccgtaaggagccccctgttattatcaaatatatcatcattaatcgctttaaaggtgagaagaacatgctggtgaagttgggtaaggtggatgccagtgagacaacagtgaatttgagtgagaatcagctcaacaaatatgccaagctggcacccttgaaaggcttctggcaaaagaagaagaagcagagaaacaccaacacggactccatcaagacacctttttcccaaaagcaaagctttgaaccaggtagctttgaggtgtcatttctgccacctgctcgcaaacgaaaatctaaacttggcaacaggcacaggattcaaagaatcccatccattgaaatttcagcaagtagtaaacagatttcattatgtaatgatcagaggcacgctagtaatcataaagaagatggaggcctaaaaggtacactgaagtcagcacctctgggtgctcctagctgtgcaaatggatcacatttaaatgacatcacaggccctgactcagtgaaagtcaaagcccaagacacagagtttaaggggccagagaggaaagtgctcaataaaatcaaatttaaaagtgaagctaggttaaaatctaagaaagtcaaagctgctgggcaagaaagcaagccaattgttcaaatgagccctctcttggaaaaccaatcctcaaaggctaatttaaagaatgaagttattcctgggacatcaaacagttcccgtctatctgaatttcatgaggcaaaggctgctaagagttccacttttctaccaacgacatgctcttctgaaatgcctttatcatctgctaatgttaccactaatatacctgttatcccgggagggtatctgcagacattgttagatgcttctgacttgtcaaataacactagtatctcatacttcagccaccattctccagagcaaaatgaaggcagcctcactcaaaccgaaaaatcatttgtacccctccagcctacccaggactgtgtgctcacctcatcctctgactctgagctgcagcagtcatctcataacttcaaaatggaatcaagcaactatagaaatgtgtggcccaacaaggctacttctggcacccaggaattcatggctgaagtctcaagggagatagccccaacccaatccagtgaatttggagcctcccaagtagtctccatggaaaataacctcacacctacaacatacaatccaatctgtctcaatagtggtggcagtaattgcaacaaggtcctgtatgactccatgcaagatacccaactcccatctgatgactcttaccaattatgtcactttaataatggagagatctgctttcctttccagcaggggccagtcaatatggatgatggtcggctctttagctttgattcaatggccccactctctgtcagctcaagtaattattgctccttaagcttgaagtcctgtgaaaaggatggcgatgatgatatcactgatgacttcctggcccattgcagccctaagctggtgatccagcaaagcattgatgagatagcaccactaaaggagtccactgacctcctggatatatccaacttcacccctgacaaattccgccactcttccctttcagagatgtccccaccggacacccctagtctttcccctcaaattaccagatgtgagagtatgaagacactaggaacactaaaggggttccaagagggtgtcccaggaccattggacagtgtggaaaaaatcaagtgggactgcagtaccctttcacggcaggtccaaatggaggatggatttactttaaataatcaccagtttcagttccatatgttcaatgatgaggattctgtcagcctgctccaaaaaaacccttgcctgtcaacatttaatgatccatctggtcaaattagtaccaacaacaaagtgtcaaaatcaagaaagaaaagttcacccagcaagagtggggctatgaaccaaagctcttctcagaaaaacaccaggaaaaaatccctcaaaggtaacaacaaggggattgaaaaaccacctggcaaaaactcccgccaggtccctaagtccacaaagaaagggaaatacatggctgccatcaatggagagaaaatgcaaattggcattggccgtgggggaagccaaaccaacaccatatcctccactgggaagacattggctgaatgtatccaacatggtggccctatggcctctatgaagatgccaagtcaaaagggactttctggagattgggccttggggaaggagagcagcccaggctggagtgatatgagcatgggcaccaacaccaacagccttctggatgatgaccaacgggaatttcaggagccttcctatatcttgtccaacattgcctctggtatggcagatgtgcagagattcatgatggcctccatagagcccctttgggaacccatggagcaccatggggatcccaacatattctactcccctgagtccaatagtctaaaattaaaaaccctcaaaatattggctgggacaccacaggagtctaagaaaaagatcaacagtgggtcccaaggagccactaagaatcacaggtcaatcaagggtgtgagcaaaagcaatgggaaaacagcaataggtgatcctggtcgtgcaaacatgcctggttataacgaggactctcgctctaccttctttgataaaaagtatagtaacatgagcactttaggcaataacggaccgacacacaaaaagttgtatcgtcacaaatccagctccaaggccctgagagatgagaaatgtaagggaaagcacatggagcgagaacaggtccacaaggatgagtctgggacagcttcttttgaaaaactgagggattccgactacaatctcctaaaagcagaaacaaccttttgggttttacctgtgtttgaagaagagactcgcattttccagaaagacatttgatgtttgtgttttatttctttcaaaatatgccttgtggtatgtatgttgacatgtaagtgcttaaagaaaagaattttaaattgtgggaatacgtctttggagcaaactttaatctcatgttctatgtaaaagacttaaaaagtcatacagttgcacaagtagtttatgcactatttacccacaaggaaaaaattgaaaacattgtgccaaactacaaacaagtgactgtactgtatatatttttacttctatatcaacatttggttgtatttggggaagttgtccctgttaatttactagaaacattccagtgattcttgctattaaccacccccacttatgtggatagcacctgtagatcatggtggaaaaatatgttgtgttacacaatttaccaaaattaaaggatactgtttgaaatgtgccaaattttcttacctcatctcacagattcacccacagtttaaagctcattaattatttttaaatggatatatacacacccaaacatatatatgtatatgtttgtgtgtgtgtgtgtgtgtgtatatatatgtatatatatatatacacacacacacgttcttttaaagttttagactctactgtcttgtgtggaaacatgaacagctaaacaaggcaaaataaagattttcttgttccattgtgtaagggttaaaattttggaaaagtctgaaggccacaacagctaagtccatcagggacccaagtatatgcatttacagaacgttttacaaggaaacaaaacagctgctttcaaagtttgttttctaaaagcaaaatctgtagctgaaaattatttaaagtgcaaagttatattgctgatactttatatctcagttttatatattttataatagtctgggataaattataaaaatagctataaaatcaacactaatgataaatgaagtatatagaatgcttttatttaaatagtttcctaaatgttttattccagttttgtcaaaagtgcactcatatcatggctttagtgttctttcagtgtttaatcttgcaatgccaatgtcatttaaagaaaatgttaaggcatcccagttcaaccaaatttttcttcttatgagtaaagtacatttactatcagataagatgaacaatttgtggcaacaactgatttgggccatatacccttagtctgaggataaccaatatttgatgccacacactaaacttaaatctcaattttaagtacaaatttttaaatcacattttttattcagtactccccctactttttaaaaaaaatttcacagccccaacattcctcactactactttttcttcccttttattcaccacttgacttctaacatttgatctcttttctttgcacaattgaaggcctgtgcatctgatgactgatgcattatggcacagatgagataatggatgtgagagcgctttgtagatcataaagtgctatacagatataggggattaatattattaatattgttagttgttgtcgttgttactattcttattaatattgttactaacctattaacttgtgaatatataggctggggtgggagggtggagaataagtgggaagggaaaaaggggatttaacaaaaaaagggaagatgtttcaaaaggaaaattttaagcaaaatatgaacctacctagtcaatgccacctaaatgtattcacaaacagagaagcaacatttgaaagtagtcagagagaaatggaaggaagcctgtcatgtatataagtatatacacttcccggtccatgattcctttcaccagcctgctctattccttacagctgggtcgtaaaatgaacaagcctgtgttcttgatcatgtgtgttcccagcgtcagtctcttgtgtctgtggggatgagtgggtgaggagcattctgtgaggctggtacaggcccattcctaggctttaatgctctgtttgcagtgagccctggaaaattacttagtggaaaggcaccagatgaaacatgtctcctgccccatagctaccattcaaaagggaaaataaccaaactggaaaaccttcttctatttctctattctgatagctagctgtactaaatgctatggccagtccctagaaactggtctttgttttgtttttgtttttgtttttgatttttctgttttgcagctgaattttggcttggaatcaccaactctgcctgtattgtgatccccaagactccagacctcagagtcacctgctggcttagaggagtggagtgctttctatgtaatgaaaaggtggcaattaatgaaaaaataaagaaaatgttccattaatacaatgtgtttttataaaagtaaatatgggagcagttgtcccagttttttttcggtatcagttcagctttggagaatggggtgtgagtggggtaggacagcctgaaactgttggaaacaatttccttgtgagaacttgctatcataagtcctttggaatggatattctttcagttgctcctatggagcccattaagggccaattctagggcatagttcatccctttctccaaagagaattgttattttaaagtacctttttaattggcctgcagtgtattatatgtttttaatatataaattagtgacgcataaccagtcactttgtactgaaacataaaaagaaacagagtttgagaaatgagcaataggccgaggcagaagatgtttattctcttaattgcatttaatattcctctcagtacattgtgttctgagatgttcatcatttagcattttgttggtcctgtctctgctctcacagttctttttcttcctgtcataaccagctgccttagtagagtataaaaatagtgttttgccctatcactggtatctcaagtcagaaatatatattatccttggtctgaaattcctgattaccgctcccttctaaccttccccctctgagaagctgtttcctattaatgcctccctaacagagtcccatttaatctttactttcctggaaatggtaacctcccttattcttcttacttaatctcagaccttggtcttagaatttttcttttatggtctcatatcccacctgcccaaattgtcagggctcaacaatcttaggctgctttcttctggaagttcagaaggaaaccttcccattcttaattgcctttaattgctttggctattttcaaatctaattttttaattaaattttttttaatttttatagagtaggggtacaaggacagttgtgttacatggatatattgcttagtgttgaaatctgggcttttagtgtacccatcaccgaaatagtgtacattgtacccaataggtggtatttcatccctcaaatataattttaaacacacactcgtgcccacatggacaaattatatcacatgactgaggaaacttagaaattccttttccctgaagatctgttaagaataggtctcatctcctgccctggttaggtgctatattatatggagaagggtattgagactttgggggtcatgtttgggctgtgataactggcttgaaccagtgaccatcctttctgcctcgccaaggtctcttataccagcttcttcacatatgctgcttcctcccagctttcccttctgacttcttgttactctgcaactatgtgtcaaggccttaccttttcctgatgttttcaaacctcctgcattactttgatcatcacttcttcagccatctcactgaagtccttggtgctagctgggcttttgtgacaactttcaccttctctgaactttttccttgctgggaagcatctgcgtgtgtgagggggctacggagggaagtgtgtgtgtgtgtaagagagaggcaaaaggatgcttcaaaagctataaacaactctagcaagcatcctaagtcctatgtgaggttttgcagttctagtgaatttctgttttagtaggtttcaattagcatttactgcctaaaggagaaaaaccatatccaaggaccttttagccatgcttgctattaccaagctggaccagtgtgatgtagatccaacatgtcttcagcttacagatgctctcagaacagttccaagaattgaagagagctaagtttttatgctgaagaggagaatggagcactagctagtcctaactattgctagaaatagaaatgtttattttctcctttattattgagaaattatctaatttaaggagtaaccattttcatttagggatttttttaatgactgcccatcactacagaaatatgttctttttataaaataaaactaatgtgaggttggtttgttttctaatcataaaattcactaagcctatagttacatttagaagatttagtaccaaaatcaaacttttagtaacaaacaggaatcttgtcaacacaatgtaggccagggattttgtaaaggtttctcaaagacccaaataagggagaaaaaaattttagttgggctgtttaacttgggaaacactgtcatcagcttgagggtcctcagccagcatgtgattattttgatgacaggactcaggctaccctttaaggcacattttttactcagcattaaacactagctacagtcgtgaagcagagctcccattgcagctacatacttgagatgtactcttggtttcagaatcgtaactaagaggtaaggcattggagaaggacaatgtaaaagacagaggtttagaacaaagtttatggtgtgaatgaggctttcaaaatcagtatctgggtaaattgatactaaagacactgaagaaacactcatccacataagatggaaaggatgtctgtccatctaacaagctcaggggtttctgagtctcagaatgacatcccatttcaaaaagaagaaaagagatattgaaatcattctgcctgtttgagagatgactggttatttacagcacaaaaaaaggcttagaatgaaaactagaagaggccttttgtttttcactcccagtgaggagagtagaaatcttaagatgctctactgggctacctgtagcactgactggagtttgctgcctacagagttttgaatgtactagtccttagtttccatagaactgaatgcacctctttagtaagttgctgatttatggtgctaaagaaaatgattattcccatttttttcttcttccccaagccccttaagcatttaagaaaatttaaaataaaagcgttagaggccctttttatgaatgtaacctaagtttctgtttgacatatgacactgcaacttaaaaatgttaggaaattatttgcctttttttttcttttagagttaagctttataaataatctgtagaatcaattgaagtttaaagcttaaggatcactcttaagacgtctacaaaatcttgtatatttttaagtgtgccaatttgtaacatattttgtaagtgtatatttttcttagaaaagtgctgtgaagtgtctgtatgtgagagttttcctttttctgcaccactaggtgctaataaaaggatatttacttcaaagtttctggttttagaaaccacaatacaaagaaaaaaaatacacttttgttggaaattttgtaacacaaaacatgttgtgaaagagtgtagtgatcttgtgcaaaaaaaatgaacatttgtgagcttcttgctgttttatagattttcttgtaaattattcttgtaacacttctggttttgttgttcttgttgcgaaggtttcaaatatttgtgactgaatgtacggtgaaactgtcataatgttacctagctgagttttgttattgtttatgaaataaataaaaagaaaagttt

SEQ ID NO: 189 - DNA, 1878 bp, Homo sapiens
cacggattttatagcatttttatataattgaggattgtcagaattggaaagggccctggagatcactagtactaccctcctcaccttcacagataggtaaattggagcccaggaaccgagatgatcacacagccaggtagggacagtacaagaactagaatgaaaatcctagctcctgactcagtgttctttgcacgatgccacactgcttcccaattcgctggtcagttattaaaatttgtcaggcctgccgaaggattgacatgctgggcaatgcaggccaccacggtggatctgtgactcctgaaggtggcaaagccctgcacactgccttgggatgagcacactgagctctgcagggcctcagctggaaggcgccatccaatcgtccttcccctccccagcagaactccagaggtggggcggctgccgcagggcccaaggctgcctcggcagggggctttgtgctttttgttgtggaggccaccagggattcaggaagatcctgaatgggttgtcaattgactgaaaagtaaattcccagtgagtttgaacctccacggtttttgagacagtattaaaagcttgagaacggagattatggatggcaccaggctgggcactgccattcttttactttccttcatgcattttttcggatccagagtattaacaccactttttttactctgcccattcaaaaacagtaggcaaattgggggaaccaatttataatcactcaagcccactgccaaagttcggataagccagggcagaggggttagattcccccccctccgtaggcagagagaggcctcaggagagtggacatctttactgagacagccccaaacacaccagtggctctcaaagtgtgtccctgagaccagcagcatcaccttaggaatctgctagaaataaaaattcttgggccataccccagggttactgaatcagaaacttggttggggcctagcagtgttttcatgagccctccattgatcttgatgcagctgaagtgccgggcaccagtgaaagggaagggctgcggtagtgattccattgattcctgctttgatggaagttatggcctcacaggttagacgttgcaagttgagttggccctcttgcctaggtgtgcctccttgccttgggattctgacatgaacaggtgaagtctcttcatgattttttttgttgttgttgttaatggtatgcttgctattatggccaatatgtaaatgttactctgaatacatatttatataccatgttacttagtgacattattcaaacatttgtatgcgtatttgtgaaattgtttgcatcagtcatttaaaaaatatttcagcctaagttttctaagaggtatgttgaatacatttttaaaagccagcttaagggtcacagcagccttagtttaggagaagagctaatcacaggtgaccactcaagttctttcaatgaagacctgatgatgtatttagttcccattttccacggtgattgactcaatttaagtgtattgtggctatatgtaatttacaggctgctttgcgttgcaggtgggaaaatctcccaggctggtgtgaggctgaactggggtaaaagaccccctgacccctcctcattcttctaaggtcaccacctcttagagggtctcttattttctttcagagatcaaatgcacagttatgctgtacaactaaattctgcagtcttgggaatccttacgagtaccaactattagtcactttttaaagtccccaaagtggagtgaggatagggggagtggaagcagtgtttggttcttactttacccaaactgtgtataaagaataaagttagcagaatgatgccaaaaaaaaaaaaaaaaaa

SEQ ID NO: 190 - DNA, 2546 bp, Homo sapiens
cgctttagcagcagccgctgctgccgccgccgggggagaggcagcctattgtctttctccgcggcgaaggtgaggagctgtctcggctcggcccgcgggggagccccgggagccgcacggagatggaggaggacatctggacagtgagcaggaggcgcttcggcccatgccgaacatcccaggggacctggagagccaggaggccatggtggcatttttcaactccgctggagccagtgcccaggaggagcaaagggtgtgctgccagcccctggctcacccagtggcctcgtcccagaaaaagccagaggtagcggccccagccccagagagtgggggtgagtctgtgtttggggagacccaccgggccctgcagggggccatggagaagctgcaggaaagtacatcagccagggggcagtgtcagagacgcagcactgggagaggaggacatcgtcaggctggcccaggaccaggaggagatgaaggtgaacctgcaggagctgcggggcaggtgttgcagcttgtgggagaccacaaggaggggcatggcaaattctgaccattgcccagaaccctgctgatgagcccactctaggagccccaatagcccaggagcttgggtgtgctgacgagcagggtggtgagtagagccctcaggcggggtgggcaggcaggagcaggggaggctcacactgtgctcagattcccaccccccctccctctctctgaagatctttgtgaggtgagcctcactgatagcgtggaggctgcaccaggagaggacagggagggttctccccacgacaaccccactgcacagcagatccagcagctgcttcctgtaatgcaggactccccaggagcacccaggcatgggcagcaacccctgcatgccattctttttgggctcccgagaacagggagataaacaccaccatcatctgagagccgggaaggggaaggcgtaggtgtgggcgtggcaaggttcctggaaaagaggggctggaagggaaaggggaggaagatggagggagaagctagagcttcataggtagtgcctgggggctgtggcggtcctccccaccccacacacactggcctctctcatggcacccaggcagtccacccacagttcagaccaatgctcaactcccccggcttccctcttctgtggtcaccccatcttccaacccactggcccagggccacctcttgcttggggagccccacccaacagccaccaagcctgacagaaggaacactgcttgaaccaaaatggtgaagctgtaagggatggctggctggagtgagcgccagaggcccctctctgggcagtcagaaagcccagggtccactgaagggaccctggggaaggcagggagggcaggtagctagatgccactgcccatagacttataagtctaagaggggaacctcaactggttggcggggggctgcaggttgcataggtgaggctgggcccttcctgctgggaaaagcagaagagggagactccgtggcaggaaaggcaggtgggctcgctaggcggagctcagctgggccagcaagcactgtggtctccttggctgaatagcacaggtgacccctaggagcaacaggccaaggtccgtgagcctgctggctggcagtagtgcttcagtagtgctggccagggacccagccttcagtcacatgctagcagctgtgatggtacctgggagggagggaagggggctgtgtgtccttgcatggcctatgaagtgtgttgtgggataaccgtgtgtataggactctcaggcttttatcctagatcaccactggattgctgacagatagaggacgtgggaccgtgactatcacccctaatctgcagtggatttggctctcggcactcccaggctgggagctggatacctgccctggcagcatgactcagactgcatgacagtcacagactcgcctctgctcctgtggtccagtggccggacaccccctgggatggctcaaaggagtcaggacttggaagtggggacatcagggtagctgaaggaaatccacacacccagagcatctcggagttcagactctcagacctgaagtaggcgcccccgggactgggctaggagttggacggaatggaggatggaggacagcgagaagaaaggaagagaaatgcaaagtgtgggcagccgccaagagtgaaaatagagggaagtgtcatgcaagtgctggacagaaggcggcaggtgggacgagccccacagccccctcctcaaaaacgaccacctccaggactcagtgatccctggggggcaggctctgccagccctggctgccttgctgggcccttctgggactgtgcgctggacttggagccccttggagtatggcttttcacacgggcttctataccgcttcgactggaagatccacctccccactgccttttctcactcagatggggacaccgaggtccagaggaaaagacacctgtcaaatgtcacagatctgggaggggacttaagacttatcatgccaagagg

SEQ ID NO: 191 - DNA, 11527 bp, Homo sapiens
cgggggaccccacttgtgtgcagcctagacgctggttcagggagtcgtacatggaagccttgcggaaccccatgcccctgggcagctctgaggaggccctcggggacctggcctgcagctccctgactggagccagcagggacctggggactggggcagtagccagtgggacccaggaggaaacctctggcccccggggagacccccaacagaccccaagtctagagaaggagaggcacacacccagccggacaggtccaggagctgcagggcggactcttcccaggagatctcggtcctgggaaagggcacccagaagctccagaggggcccaggctgcagcctgccacacctcccaccactcagcaggctccaggcctgggggccacctaggaggacaagctgtggggaccccaaactgtgtcccagtagagggtcccggctgcaccaaagaggaagacgttcttgcatcctcagcctgtgtcagcacagacggcggcagcctccattgccacaaccccagcgggccttccgatgtgcctgcccggcagccacaccccgagcaagaagggtggccacccggcacaggagacttccccagccaggtgcccaagcaggtgctggacgtcagtcaggagctgctgcagtccggggtcgtcaccctcccagggacccgagaccgtcatggcagagcagtggtgcaggtccgcaccaggagcctgctctggaccagggaacactcgtcctgtgctgagctgacccgcctgctgctgtacttccatagcatccccaggaaagaggtccgggacctggggctggttgtcctggtggatgcacgcaggagtccagctgcccctgccgtctcccaggccctctcaggattgcagaacaacacatctcctataattcatagtatcttgctgttggtagataaagaatctgcatttaggcctgacaaggatgcaataattcagtgtgaggtcgtgagctccctgaaggccgtgcacaaatttgttgacagctgccagctgaccgcagacctcgacggctcctttccctacagccatggtgactggatctgcttccgtcagaggctggaacacttcgctgcaaactgtgaagaagccatcattttcctacagaattcattctgctccctgaacacccacagaaccccaagaacagcccaggaagtcgccgagttaattgaccagcatgagacgatgatgaagcttgtcctggaagacccactgcttgtgtctctcaggctggaggggggcaccgtcctggcgcggctgaggagagaagagcttggcacagaagacagccgggacaccctggaggccgccacaagcctgtacgaccgagtggatgaggaggtgcacaggctggtcctcacctcgaacaatcgtctccagcagctggagcacctccgggagctggcgtcactcctggaagggaatgaccagcaatcctgccagaaaggactacagctggcgaaggagaacccgcaacgtacagaggaaatggtccaggatttcagaaggggcctgagcgccgtggtcagccaggctgagtgcagggagggagagctggccaggtggacccgctcgtccgagttgtgcgagacggtgagcagctggatggggcccctggacccggaggcttgtccctcctcacccgtggctgagtgtttgaggagctgtcaccaggaggctacctcggtggctgcagaggccttccccggggcaggtgtggcagtgctgaagcctcatgccctggggaaaccgtgggcatcacagcaagacctgtggctgcagtacccccagacccggctccgtctggaagaggccctttctgaggctgccccagaccccagcttaccgccccttgcccagagccccccaaagcatgagcgtgcccaggaggccatgaggaggcaccagaagccaccctcattccccagcacggacagtgggggtggtgcctgggaacctgcccaaccactgtccggcctccctggacgagcgcttctgtgtggacaggacggggagcccctgggcccagggctgtgtgctctgtgggacccactgtccctcctcaggggccttccaggggcaggggccaccacggcccacctggaggacagctctgcctgttcctctgagcccacccagaccctggccagccgccccaggaaacatccccagaagaaaatgataaagaaaacgcaaagtttcgagatacctcagcccgacagtggccccagggactcctgccagccagaccatactagtgtcttcagcaagggcctggaggtaaccagcactgtagccacagagaagaagctcccgctgtggcagcatgccaggagccccccggtcactcagagccggagtctgtcctccccctcggggctccaccctgctgaggaggatgggaggcagcaggtgggcagcagccgactgaggcacatcatggccgagatgatcgccacagagagggagtacattcggtgcttaggatacgtcattgacaactattttccagaaatggaaagaatggacttgccccagggccttcgagggaagcaccacgttattttcggcaacttggagaagctccacgacttccaccagcagcacttcctccgggagctggagcgctgccagcactgccccttggccgtgggccgcagtttcctgagacacgaagagcagtttgggatgtacgtgatctacagcaaaaacaagccgcagtcggatgccctgctcagcagccatggcaacgccttcttcaaggacaagcagcgggagctaggtgacaaaatggacctggcctcctacctgctgcggcccgtgcagcgtgtggccaagtacgcgctgctactccaggacctgctcaaggaggccagctgtggcctggcccaggggcaggagctgggcgagctccgagccgccgaggtcgtggtctgcttccagctgcgtcacggcaatgacctgctggccatggacgccatccgcggctgtgacgtgaatttgaaggaacaggggcagctgagatgccgggatgagtttatcgtttgctgcgggaggaagaagtatctgaggcatgtgttcctctttgaagacctcatcctgtttagcaagacccagaaggtggagggcagccacgacgtctacctgtacaagcagtccttcaagacggccgagatcgggatgacagagaacgtcggggacagtggcttgaggtttgagatttggtttcgcaggcggcagaaatctcaggacacctacattctccaagcaagctcggcagaggtcaagagtgcatggaccgatgtcatagggaggatcctgtggcggcaggcactaaagagcagagaactcagaatccaagaaatggcatccatggggataggcaaccagccattcatggatgtcaagcccagagaccggacccctgactgtgcagtgataagcgacggggctcccaaatgtgcagtgatgagcgaccgggtccccgacagcatcgtcaagggcacagagtcacaaatgagagggtccacagcggtgtcctcctctgaccacgccgcccccttcaagcgaccacactccaccatctcagacagcagcacctcctcttctagcagccagtcctcctccatcctggggtcgctgggcctgcttgtgtcctccagcccagcccacccgggcctatggagccctgcccacagcccctggtcatctgatatcagagcctgcgtcgaggaagatgagccagagccagaactagagacgggcacccaggctgcagtgtgtgagggggctcctgctgtgctgctgagccgcacacgccaggcctgatgactgtcagggtggcagtgcccatcatgtggctagaacaatacagagggagcagcacgccaggcctgatgactctgggggtggcggtgcccatcgcgtggctggaacgatccagagggaatagcacagcaggtgtccaggtatttcccaggattttagacattccctaacattttcaaacaaatttataattttgtcttatttaaaaaacaaaccttccacttccacccaagacaacagcataggaaacagacctaaaacaagacaaaaaaagactaaacatgaaacaaaagatgtcaagacacaagacatttggcaacaaaggaccgcgatccctgagagacaggaaaacgggaggtgagcccggtgatggcctcagacctccctccgccttgagagtttgcaggcctcagtgcagggaggggcccaggaagagcccagcagcctccgtgagttgaagagaccaagtcagcaggagttggcaggtcagagtgccagagagagatgcctgcatggggaaagactcaccagatcagcccctccagcacctagtgggttgctacccattcgcacactcaaacagggaggctaccaaggctgggagcaacctttgaaaagaccaaagatcaattcctggtactcatgtgggctggggacaggacccgttcccaccagccagactagggaaactctcagtagatcaattcctgatactcatgtgggctggggacaggacccactcccaccagccagactaggaaaactcccaatctgtgagcattaggtggagttctcagaaaatcttgcctcaggaatggggataattagccctagactgagccctgctcctgactcgcctacaaaatcataaaagcaagacctaaaatgatcaaaccattcccagataattcactttatcccagaacaaagctccagatgatctaggggttaccaaagtgtccgcaccctgcaaggtaaactcacagtgcctgacctcggagtgccaggcgtgcagaggagcagccaagggcaaacactccaaggagagtcgcctggcaaagccaaccacccagagccggcgtctgtgctagaatcacagaattcaaactgtggctgaaatcgcagcccaggcgtccagaaagttaaagttaagaacctataatcccagcactttgggaggccgaggcaggcggatcacgaggtcaggagatcaagaccatcctggctaacatggtgaaaccccgcctactaaaaatacaaaaaattagccgggcatggtgttggccgcctgtagtcccagctacttgggaggctgaggcaggagaatggcatgaacccgggaggcggagtttgcagtgagctgagatcacgccactgcactccagcctgggcgacagagcaagactctgtctcacaaaaaaggttaagaaatgacttaatggaagagattcagaagacccagaccgaccttacagggatgagaaactacaatattgacagtggaaactatcctggatggggtaacagattggatttcacagaagagaccatgaggcaccttgaagacacatcagtggaaactatttgcatttgttgggcctccagagagacagaaccaataggagatagctagatatatatacagacagacagatagatagatagatagatagatagatagatagatagactgacagacagatgagaggggccttaggggcattggctgacacaattttggcaggtcaagagccccacaataggccatccacaagctggagacccaaggaagctgctagtgtgcccagtccgagtcctaaagcctcagagccagggaagccagtggtgtaattctcagaggccaaaggcctgagaacctggaggccactggtataagtctgagtccatagacccagtgaactccaaacacaagagatatgagtgcacatcataatcaaattgcatataaccagtgataaacagaaaatcctaaaaccagtcagaggacaagggcatgttctgttgggaggcacaaagctgatgaggatggctgactcctcaggagcagcatgggtgagaggcagtggaatgtactaaggagaaaactgccaaattcacattctgtacctgacaaaatctttccgaagcgatggtgacataaagacattttcatacacacagaaactaagagtttcatccccagcagacctgcactacaagaaatgttaaatgatgtgcttcagggaagagaaaaatgaagagcatgtgcaccatccaggattttcctcgttatttgaatccctttggcccatctcccatttgccccaaggaatgagtgctggcagtgagctgcactttttttttctctaaacgggaaatgggttaaaagatgagtggcttggccgggtgcggtggctcatgtctctaatcccagcactttgggaggctgaggccagaggatcacttgagcccaggaactggggggtcatgctgggaaacatggcaagaccgcatctctattaaaaataaataaaagttaactgactgtttaaacaaaagtattaacgtatctgcggtttgtactatacgcacaggtaaactgtgtgaccacagcagcgtgatggctgggagatgctggatgtgatacgtgaagtgaggggtatcacttgaaggtagattgtggtaagctaaagatgtacttataaacccttgaaacacccactaacaaagaattacagctaatagaccaacagaggagataaaatggaatttttaaaaatccagtccaaaaatacgtagagaaagagggaaagggaagaatggacttgggggcgacacagaagacaagtggagagagactgaagcagccactggccatcacagcaaacacaagcagggcgcaggacgccagcaagccacagacaggcctgctctctgaattggtgaccacatgagtaacttcacgggtctgttctatgtccagagttgtcaaactgcatgctttaaagatgtgcagtggatcgtatgtcgcttaaatctcaacaaagcagtattttttttaagtacaatcatgcacacagcacttcccctgggaggcaggggctgtgcccacagaagtcgttacctctgcgtcctgagtatggacagccaccatcacacagccccagaggccgcccaggctctagccacactctggcactgcctgggacaggtgccctcaggaacccaaatgccactgcccccgtgaaagccacttcaagcgtgttgcttcaaatcagaaggcatctacgcctgtggaagaggaggctgctgggggcccaggtgtgcagggggcagggccaggtgcaggggcacagcttatgcctgtggccaacccactggggagcaaggctggggatatgcccaggccagcagggccagcaggagtgactgcgccatcctgaacacgtccttgggcctcccaggaccttggtgcctcccatctgggctggcacaagcctccagtcaaaagatgggtctctctctcctgatagcatggagcctggatgtgggaatggagccacaccagccccacgggagccccacgacccatcgggctgtgggatgcatccccacggccgggacccctcagcctgcgacttggtctgggcagatgcaaaggccaccctgcagggctgaggtgtctgtggggaaggaggtgcccagccctgggaggccatcttgctcctgctttttatttaacccatggggctctttggcctcattttctgttttttgagtttctcgtgcactccaaactgtcctggagccagccctggtgtgaaacagaggcttcctgctggcagaagaggcccaccgagttacgtccacaccagctggccctgggcacctctctctctggccttctgtccacactgggatttggctctgatttccagaaggcagggttaggaaacacctgtttccaggcagagtaatgcttctgtctgaatcaggcctcatgggcttcaccagcagacacgaaggtttcatttagatggcgaacacgtgttctcatttctccagggttctggacccgtgagctgaagcaggtgctgagaagtgggagaggcggccactgggtccctcagggtcactcaccccgccacgtgaggccacttccgcccagcagtgggggcgctgggagctgaggggcccacaggggacgtgggagacagccccgatgcgtccccatccgcagtgacgctagcgcggagtcgtcgccaagcacgtggagggacagccctggagccctggcctggcccagcatctcccagagtcacttcctgatgcctccccagccctgcccaggaagggtttgtggccacagccccacagcggccccctcgcctcgaccaccagtgcctccttccaagctgcctgagcaatcctgggtggtgagctccaccactcccacccacgcctcagcactgggaccccccagggatggtgtggggattcctgccccccgtccatgcctcagcactgggagctgggaaggtgtgtgatttcctcccccacctcagtactgggacccccaggaagggtgtgtggccccaccatcctgaatgctcagggctggtggtcagcgaggtggtttctaaaccaagccctgggaggagccatcctgggactgtgcttggacaaggttggggctcccgcagtgagctctagccctccccaggaccctcccacggccccagggtgccggccttcagactgaccccattcgtggatgagtctacaaggctccccagtgcccagcaagagtgtttttacattcagaggtgaggaaggggtgccagcatctgccccagacacaaccgggcaggtacagatgtcatccccttgaggacagcagggaggcgactcaggagaggctgatcagacgggagccgcatccccatcaccttccagagagacctcttcttttgccaggtgtcgtgagggctgtggcttagctgggcctgcgtccatccccggttctggggagatgcccgggcccctcctggatggcagcagcagtggaggtttgggttttgagggagccctaagaacctgagagacttagatggagcatggcacgccctggagagtccacgtccccagacccctcatgccaacaccattccacccagcagtttcttccctgtggtcagaacaaaacccccaagcctcaggcctcaggctggttttctgacaggcaaaatgctccttatataaggaaagacctttccttggctgaccctaaagtagccaaggggagctcacatcgcctggcctgccgccaccaccaggctgcctgaccagctcaccgccttgttctagatgcttctgaagcaacagctcgcctggccccacccccatcaagcatctgctgggcagcctcactccccggcccgcctgtagctcccaaaggtctcaagcctcaacatcctggtaaccaagtgcacccagagggctggcagggtcacatggaggcaggggacccttggccccagggtggtcgtcttcccaggaggtccgcctgtcaggtcagagggcagcaggaggccaccccacctccccgggttccctcgagcattcctttgtcaggagcagctcccccaggatccaggcatccctggcccccctttgcccccgccctgctctcaggagccccctgccaggtgctctgaccacaggaaacaggagccctcagggccactgccagaggacggattctgctgccaaccagaggtcctggggctggcggcgctggtgtgcctgccctgggccttcagcagcccccataaggagaaagctccagcctcccgttcagacaaggctccgtcctggggacacgcctctcccaaggtcacccacgtgggggctttgttactcatgcttcccagactgcgtgctgtgtcagagttttcacacctgcctgatgtcctgggggggctcacagaggaccgaccctgcagggagatgctgacccaccctgagacccaggagaagaaaacggccagggtccaggctgctcccaccatccctgggggattagcaccttggctgagcccgaactgaccacctggggcgtaggtccaagatttaattacaaaacgataggtgaatgtgggttctgtgtgcctgtgacatagagaatgttttccacaccgcgtgtgaaatgacgagagcttttgtgtcacacatgtagctgctacgagacagacgctctcgttccggatcagagcagcagacagaactggcacttttagggtccaaaccctgttgcccacagaacgcccatgacaccagctgggtggagctgccgccgagtccacgccccgtctggctgggacctggagctcccctcaagctgcagatccactctgcaccacaaggtggcctcgcagaggagcctcccgagctttggaaccagaggcaggctcagcgatgctctccatccggcctggccccaccgtgtgtatcaggtgtcagaggccttgctgggtgccaggccacgtctgtgctgtcacagctttgaggggccagcgggtcctagggagaggcccgtgcgacgtgagtaacagcagtttttcttctgacagctgggatggaggtgggtcctccagggagtgccccagtcctcgagagccagacttgtgcacgggcctggaaatgaaggtctcaggcaggggctgcgcacaccgatggtcagcattgccgttcggggcctgcagtcgcccataatgggccctgccccttaggcctggcctcttttgctttcctcctggatggttcctctacccctggtccagcagggactcagcagtgcctgccagctgcagacccccatgctcctgcagcctggaaccctcctgccctccaaaggtcatggggtgacccagggtgggaacaccagaccccctcaccccgtgtccaccgcccatggccgggctcacagtgtctcagagccgtggtgagccatcctaggaccagtgtacctcacaacctttcagaccagtgaaggccagtgggctgggtggtccaggcatgtccccaacgcaggtccagccatctctgcacagaactggaatctcggttcatttcggtttcagcaggtcccatgtagttagcaggacagcacttgagttaggtctgagaaagaacgcctgtttgtcatggcatttcctgtaaggagcccagagccgtggccccaggttgggacggcggcgccagagctgggcctgagtctgacccaacctgtgctgagtggtcctgctggaatgggaaccccaagaggaccacccctctccaaaagaagggaaaacagtaagagagagggaggctgcaggggcccagaccttggctgaccttcctagccatggtctccaccctccgagacccaggggccccgcagtgacagcagggtgttgggccacacagagcccgagtaggtaaaggaaggttctggaaaccacttttcagaacccaaaaggtgtctgggaaatggcgttacctgccactgttgttaagtgtttactttgtatcaatactgaattgttaaaaattttaatcataaaaaccaatggaacatgaaaaaaaaaaaaaaaagggcgaccgctcgcgatctagaa

SEQ ID NO: 192 - DNA, 2179 bp, Homo sapiens
ctggccgccgagggtcgcggcgcccaggctgccggagccgccgccgtctgggctcggatccgggaagctgcggcgctgccgcggcagcggcgggcccctcatttgcatgcgattagcatgcgcccgcccgcctcatctgcatgcgcattcctcgcgccgcattcctgagcttaaccccgccgctgccggcgtcgccgcaccagctcggacgcactgccccgcggggccgcggctccaggtgggaggaaggcgggcgaaggaatgtgcggccagctccctccccttgaccccagatagctcccctgggccaaacgccgagaggttttagagtttctggacggggaagattgcaaaagtctccgcaaccttctcaacctctttcgtcttctagggaaaccacaaaactttcgagaggaaaggggtggcgggcggggagctctcctccggagaaaaaacctcaacaagcggagagggcacaaaggctccccacgccacgccccgagcccctccggcaccccaagggcggtccggggtggtgggaaagcgccaagccctgggagtgcgtcggtgggtccgggacggcggggcctccgccagggctcctggccctcgatgacctcggctgagaccgcgagccgcgcggcggaaagcggaggaactcccgtccggccctgtagccgcccgcaccgcgccccgtcacccgccgccccttcgcgtccgggcgctccagccgcggggccccggaagctcctggtccctggcctcccctgcttggttcggggcggttggccgtggacgcgccccgactctagtcccttccgtccagccgcccgccccaggatgtccccccaccgcagccccgccgtggccaggaggtgtgggcggccacgccggagggacccacggcggcgccggacgcccgcccttcctaggccctggcccggccggggtgggccgggacgttccctgttgcataggcatttatttattcagcagctactacgtacgtgctggcccgcactgccgagggaccggacgcctgccccaggcgggacaatgccgggtgcagcgctggcggggcctggacgccaagcttcagggtccccagcccctcagtcagagggggcgcctcccaggccctggactcctctccagccgggtctacaccaccgtcccccgtcatcttcttctgggttactgagcagcttcttttaaaatagcaacaccgaggaaggccccgaagcccagtcttgcacctcgtggtgtgaagtcgtttaatcctgcccgctaatgcgtaaggactttccaccgtgtgcaggactccgcgctgggcaggggctctcgcagggtttgaaccgacctccgcctcccctgcgggttcacaggcctgcgaggaagtcgcgtgaaggagattcgctactgtgtgaggctggcctgcgcggcgtgggcagtagctgtccggggctggggacagctttcggctccccaggccatcccgtcggggcatctgcggccaatctcgaaggtggagaggctcagggttggaacagacttcacggaaggggtcctagaagaggaaaggggtcgtgtttgcccttagagcagtctgggcgtgaagcggaaactttaaaccaccagaaactctggagagcttggagcacctgggaaggagcaaccagagtgggccggaggtagggaaggaaggcacccacggcgaatttgcccgctttgaccgcatttagggcggccgcttgtgcagccagccttctggaaggtaggctttgcgcttggtgaagagaagcccccacctccggatctgtgttccgccccagtccatttatcaggaggtgatcacacaagtcaagcttctctagttcccggtggaatgagacgccctggtggggtcttaaggttgaacgtttgaatactgtaaaaaagatgggacctgcctacaattaatctctcacactactgagcgaatgtgcgttgttttggacttccctaaattggcccaaatgcatagccaacacttgaattgcggtgtactaacaacatcattcagcaccaaaccaaaccattcttatttaaaccttgcttcctagcttatttatttcccaaacaacttgaaaacatttgttatactaaaatgtctacatcttactattaaaaaaaaaaaacc

SEQ ID NO: 193 - DNA, 1733 bp, Homo sapiens
gcgggccgcctggccctgggaaagcgtcccacggtgggggcgcgccggtctcccggagcgggaccgggtcggaggatggacgagaatcacgagcgatgtggccctggcgttgagtttgtggctgtggtcgcttcggggccccggtggcgggaccaggggctcgtgaggcaggtcttggtgggtgccgagggccttccggcgtcccaggcggggcgccgcgggaccgccctcgtgtctgtggcggtgggatcccgcggccgtgttttcctggtggcccggccatgcctgaggtttctccctcagccgcccctctgcgggctcccaggtgcccttgccctcgcggtccccggcccttgcctgtctgcgcccccttccccgcccgccgcccgccgatcctctctcctccccgagcggctcaccggctttacgtcggttggtggccgcgtctgggaccgaaccgggcaccgccttgtggaaaaaaaagaatagaatataccctgttaaatcagacatgatacttgcttttgtggagcttatgctttagtgcagaaacagaaagtcaagcaaaaactcaaactatgtaactttaaattggatatgtgctaatgaaggaaaatgtggcactgtaagaaaaaataatagggagttaaaggataaataggagtttgctggatgaaatttatgaagagctgaagatttcaaacaaaagaaactgatgcaggagggtgcagctttggagtcaagaatgaagttctaggagatagagagcaaagaaatggtgggagaggaggtcaaacaagacaaatctctcctctgccttctccttatcagactactcaacatgaaggcaataagaatgaagacctctatgtataattgacttccacttaataaataaggttacttggtacactggtcgacaaaaccttgaaatgttgatgtttaagggctgttgattgctggcagcaaagaagtccaactgtgctggtacccgagatagcgtctccacattttcttccaggatcatcacctttgttctaaatagctcccacatagtgtgaacagaagtcatatgttttagattttctgccttggcacccaggaaaccagtatgattgagtaaacatattaaacttcctctgcatttccagcctgaacagatgttgagtacaagctgatccacctacgttcaacctgagagagtccacatccacagactgtttcatttccctttttcaatttacatagaagcatagattcttgctggcatatacaaatgcgccatttaaggcaatcaaaaatggttccacatctcatctgatttccacaattgttgctgtaacgatggactactgaggagagagacaatttctctggcacatcttcccacgttttagcaacatgttcatggagagccaatattcagtaattacagcccaattcctcacaatttcacaattcgctaacaatatgcattttcacaatgtaaagctgattttcctttaaccaaatcaaacatgaaaagatagctgcatgcaatgggcaatctagatcattagaagattgatgtaaaattagaggacactgagactggaatagattgcaaacttcagggagctcagaaaacttgtaaactctacattttgaggaaatatgttgtcgatgcttttgcaactctatgcagtaacttaacaaataaagccttaaagtaacttaaaaaaaaaaaaaaaaaa

SEQ ID NO: 194 - DNA, 2023 bp, Homo sapiens
cgagtgttggcggggactgagcctcctgcttgaggtagttgtttttactcccagtccccaggctcacgagccccacgcgcgctcaatctgccctcccgcttctcctcgccactccgagttctgcgccctcgagatccagcgcatccgcggggtgggcgggtcctggcggctctttgccctcttccaacatggccgccgctgcctctgtgacaggcagggtcacgtgggcagcctcgcctatgaggtcgctggggctcggccggcgattgtcccttcccggaccccgtctcgatgcggtgactgccgctgtcaacccgagcctgagcgatcatggcaacgggctcgggcggggaacgcgtggcagcggctgcagcggcggcagtttggtggcggactggggcggcggagcggcggcggcggcggcggtggcactggcactggccccggccctgagcaccatgcggcggggcagctccgagagcgagctggcggcccggtgggaggcggaggcggtggctgcggccaaagcggcggccaaagctgaggccgaggccacagcggagacggtggcggaacaggtccgcgtggacgcgggcgcggccggggaaccggagtgcaaggcaggggaggagcagcccaaggtcctggccccggccccggcgcagcccagtgcggctgaggaggggaacacccaggtccttcagcggccgccgcccacgctgcccccgtccaagccgaagccggtgcagggcctctgcccgcacgggaagccccgggacaagggccgaagctgcaagcggagctcgggccacggttccggcgagaacggctcccagcggccggtcaccgtggacagctccaaggccaggacctccctggatgccctgaagatcagcatccgccagctcaagtggaaggagttcccatttggccggcgcttgccttgtgacatctactggcatggagtttcatttcacgacaatgacatattctccggtcaagtgaacaagtttccaggcatgacggagatggtgcgtaaaattactctgagcagagcagtgagaaccatgcagaatctctttcctgaggagtacaacttctaccctcgctcatggattctgcctgacgagttccagctctttgttgctcaggttcaaatggtgaaagacgatgacccctcctggaagcccacttttatcgtgaaacctgatggtggttgtcagggtgatggaatctacctcattaaagaccccagtgacatccgcctggcagggaccctccagagcaggccagcggtggtccaggagtacatctgcaaacctctccttatcgacaagctcaagtttgatattcgtctgtatgtcttactcaagtccttagaccccttagagatttatatagccaaagacggactctctaggttttgtaccgagccatatcaggagcccacccccaaaaacctgcaccgcatctttatgcacttaaccaactattcactgaacatccacagcggcaacttcatccactcggacagtgctagcactggcagcaaaaggactttttccagcatcctttgtagactgtcttccaaaggcgttgacatcaagaaggtctggtctgacatcatctccgtggtgattaagacggtcatcgcgctgactccagagctcaaagtcttctaccagtcagacatccccacggggaggccgggccccacgtgcttccaggtaaccattgccagttcccagcctgcgtttccagccttgaccggcctcaagagggctctctggcttcgtgtaggatgagtgatcggggtgggatggccagaggaggggacagtgttggtggtgctgtgggcttgggtgttaaacctgggcccaacttccaagctttctgtttgctccctgtgtgatttggggcaagctacttcccctctgttacctgtaaaatgaaatgaagaatacctatcttaaaaggttcttgtaagaattaaatgagataacacatgtaaaaaaaaaaaaaa

SEQ ID NO: 195 - DNA, 1908 bp, Homo sapiens
agcgccgccgccgccgctgctgcagcagcagctgctctgcagagtggtggccggggccagggccggggtgccctccctcccaccttctcccgccatgagccagggaagtccgggggactgggcccccctagatcccacccccggacccccagcatcccccaaccccttcgtgcatgagttacatctctctcgcctccagagggttaagttctgcctcctgggggcattgctggcccccatccgagtgcttctggcctttatcgtcctctttctcctctggccctttgcctggcttcaagtggccggtcttagtgaggagcagcttcaggagccaattacaggatggaggaagactgtgtgccacaacggggtgctaggcctgagccgcctgctgtttttcctgctgggcttcctccggattcgcgttcgtggccagcgagcctctcgccttcaagcccctgtccttgttgctgccccacactccactttctttgaccccattgttctgctgccctgtgacctgcccaaagttgtgtcccgagctgagaacctttccgttcctgtcattggagcccttcttcgattcaaccaagccatcctggtatcccggcatgacccggcttctcgacgcagagtggtggaggaggtccgaaggcgggccacctcaggaggcaagtggccgcaggtgctattctttcctgagggcacctgttccaacaagaaggctttgcttaagttcaaaccaggagccttcatcgcaggggtgcctgtgcagcctgtcctcatccgctaccccaacagtctggacaccaccagctgggcatggaggggtcctggagtactcaaagtcctctggctcacagcctctcagccctgcagcattgtggatgtggagttccttcctgtgtatcaccccagccctgaggagagcagggaccccaccctctatgccaacaatgttcagagggtcatggcacaggctctgggcattccagccaccgaatgtgagtttgtagggagcttacctgtgattgtggtgggccggctgaaggtggcgttggaaccacagctctgggaactgggaaaagtgcttcggaaggctgggctgtccgctggctatgtggacgctggggcagagccaggccggagtcgaatgatcagccaggaagagtttgccaggcagctacagctctctgatcctcagacggtggctggtgcctttggctacttccagcaggataccaagggtttggtggacttccgagatgtggcccttgcactagcagctctggatgggggcaggagcctggaagagctaactcgtctggcctttgagctctttgctgaagagcaagcagagggtcccaaccgcctgctgtacaaagacggcttcagcaccatcctgcacctgctgctgggttcaccccaccctgctgccacagctttgcatgctgagctgtgccaggcaggatccagccaaggcctctccctctgtcagttccagaacttctccctccatgacccactctatgggaaactcttcagcacctacctgcgccccccacacacctctcgaggcacctcccagacaccaaatgcctcatccccaggcaaccccactgctctggccaatgggactgtgcaagcacccaagcagaagggagactgagtgcctcagcctctcaccccctcctcctcagggcagcgctaggggcctcccctatgcctcagccccatctctgctcctgtttgaattttgttattgttgtttggttgttgtttttttaagttgattttaattttttgtttggttgatttttttgtaaaaaactattttatatataaatataaatctatatctatatctattaaaaaaaatgaagtccagtcatattgatgttaccatta

SEQ ID NO: 196 - DNA, 1422 bp, Homo sapiens
ccgacgcagccgccggcccgcccgccagtctgggctcctgcacatctggcgatcccgccacatctgggcagccggcgctggagcatgaacggctctcaggcgggcgccgcggctcaggccgcctggctgagctcctgctgtaaccagtcggcgtcgccgccggagccccgcgaggggccgcgcgcggtgcaggcggtggtgctcggcgtgctgtccctgctggtgctttgcggggtcctgttcctgggcggcggcctcctcctccgcgcccagggcctgacagcgctgctgacccgcgagcagcgcgcgtcccgcgagcccgagccgggcagtgccagcggagaggacggcgacgacgactcctaggcgcccggctgcgctcggtggtcgcggcctccaggcagcccctgactccgagcggtccggagcatgcccgacggctgctgcggtcccgaccccttacccgaagcggcgcgccccacacagagaggagaagaagagaagaggagaggagagaagagaagaagagaggagagaagagaagaggagaggagagaagagaacctcagaggatccagaacggcagctggtccttgctggactgttcctgtccatgtgcctggtcatggtgctggggaacctgctcatcatccggccatgagccctgactcccacctccacacctccatgtacttcttcctctccaacctgtccttgcctgacatcggtttcacctccaccacggtcccccagatgactgtggacatccagtctcgcagcagagtcatctcctatgcaggctgcctgactcagaagtctctctttgccatttttggaggcacggaagagagacatgctcctgagtgtgatggcctatgaccggtttgtagccatctgtcaccctctatatcattcagccatcatgaacctgtgtttctgtggcttcctagttttgctgtcttttttttttctcagtcttttagactcccagctgtacaacttgattgccttactaatgacctgcttcaaggaggtggacattcctaatttcttctgtgacctttctcaactcccccatcttgccgttgtgacaccttcatcaataacataatcatgtatttccctactgccatatttggttttcttcccatctcggggacccttttctcttactataaaattgtttcctccattctgagggtttcatcatcaggtgggaagtataaagccttctccacctgtgggtctcacctgtcagttgtttgctgattttatggaagaggtgttggagggtacctcagttcagatgtgtcatcttcccccagaaagggtgcagtggctgcagtgatgtacacggtggtcacctccatgctcaacccctttatctacagcctgggaaacagggatattaaaagtgtcttg

SEQ ID NO: 197 - DNA, 4931 bp, Homo sapiens
cggacccgcccccttcagcttgggaaagcgaaagcgtggcaggggccggacctgggagcggaggaggcgggtctccatagaaacctccacctgtttccggccgggctgtgagagattaggggctgctgcgggggccaatctcagccagctcgcctcttcccagcggcctctgcgggagcggtgggtgttgtacacaatcatcatggcggcggccggggccccggatggcatggaggaacctggcatggacacggaggccgagactgtggctactgaggctcccgcgcggcccgtcaactgcctggaggctgaagccgcggcgggggcggcggccgaggactccggcgccgcacgaggcagcctgcagccggccccggcccagccccctggggaccccgcagcccaggcctcggtcagcaacggcgaagacgcgggcggcggcgcgggcagggagctggtggacttgaagatcatctggaataagaccaagcatgacgtgaagttccccctggacagcacaggctccgagctgaaacagaagatccactcgattacaggtctcccgcctgccatgcagaaagtcatgtataagggactcgtccccgaggataaaacattgagagaaataaaagtgaccagtggggccaagatcatggtggttggctccaccatcaatgatgttttagcagtaaacacacccaaagatgctgcgcagcaggatgcaaaggccgaagagaacaagaaggagcctctctgcaggcagaaacaacacaggaaagtgttggataaaggaaaacctgaagatgtgatgccatctgttaagggggcccaggagcgcctgccaacggtaccgctgtccggcatgtacaataaatctggaggaaaagtgagactcacctttaaactagaacaagaccagctgtggattggcactaaagagcggactgagaaattgcccatgggctccataaaaaatgtggtcagtgaacctatcgaaggacatgaagactaccacatgatggcgtttcagttgggccccacggaagcctcttactactgggtgtactgggttccaactcaatatgtggatgcaatcaaagacactgtgctggggaaatggcagtatttttgaaagcactttcacctctggcccaggagactgacccaaagtgaaggacattgccgggagaggcctgcagcatccctggatttcagagttctggaactttgttcataaaaaatctatattcaatctgaggtgatgtggtgactgaagccagaggtgatgtactttcaccattagcttaattttaacttaaaattaccagttccctttcttgcagtcagcttcataccatttttaaagtcaatacgatggaaatcaataaatctgaattccgaacatgttgtgtggaatactcttaagtgtgtttgagagtagatctgccaattatgttgacaagggaatgatcaaaagctttgttttttttaaaaaaaaaaaaagcagtttcaattgaaatattttcatacatctttggttgcaaacatttggactgcattgcaatgagttggggtgttttttttttccttttttgtataaaattgtatgcaaaatgggggtgggttagtaagccacatatttctgtccattgattcagatttaattctttccctttttcattctctcgcttcctcaatttgagtttttgttttaagaacccaaagatgtcagttcttcttttggtacctcatcaacgcttcctttcctgggctccctcccgccgtgctgctgctgcctgtgaacgcacggtgggagaggaagagctgctcagtcttgggcaaggagctctcacacttgctgtggtgttcgttgagcagcagagtatctcccagtgactcctgtttaaatgtcttgccctttgggcccccatctccaaggagttccattgctggttggatgattgtctgcacccctcactgagcttggcctagaggcccagcctggcatggttgtgcctgggctgtgccgctcaacagccccagctcccaagcagacaaagacctcttccaggaggagccaggtagaagatagttatacagccatatagctgcagatccagataaccttctttctttggaagttttcaagaaattcttaagcagtccaaggatgatttcaattatgcttctccattgggtccttctgctcatgcattcagttcaagtgtcctttatcccaggttcagagatgctgcctttctgaagaagacatctgaccctagcaggttggccagtgttattgaacaacaaaaatgggataaattgctttcatgattagctcaccttcttctggttttagcccttctgttctctgtacacgtgaacttctgtcatctccttctggcttggttgcctctgaaaggagggaaagtctcttggtaaattatctcttttgtgctgtttgctgtttctctgctgccgtctttgcagttctcctctcactggttgcaggctttcatagtaaggtttggcgagaaatgttccaaacatcacattttggattctaggctgtcacccctcattctgtgaaacgtattagcatgtgttcgcccaagatgactattccttgtgagccagttaatgatgatattctacgcccttcccttctaagctgtagttcaggaatccagcccacatagacagactcttgctttccatggtgtagtcaatgccaagtgatgcatctaggcaggaaaatctactctttgcttttttgggggcaattagtacatttgtgaagtgcagcatccaagaaacagcctgttttttcatcccttgagaaaggagcagtcattgcagcttttctgtccttgtcggcctgcagttcctggggaaaagagtacatctgagctacttgtccaagcctctgtctgcaggtgacaggttttgggggaaatgagatgcattaagtagaacatcatctcgggtcagacattgccccttttgtttgccaatgccccagtcctagagacttgtcctgacagtgccgcacacctacttttgatctctcagagcaggtggctccatccccagactagcctggctgctctccgaggcccctccacctgctccccttattgccccattcttgtggcttgccgggccacttggcctcccttcttgccggtgacagcgttccatcatctccccgctccccaagggccaactgcttctcactcaggctggtgtcatttcaggaggaccaaagcctgcgtgagcctttttattttcagtaaaatggtgcttttttccttacttcgagatactatatataaataataatgtaaatgacaccttttcgtacggagctgtttgagtattgctttacagagctcactaaatcagcttcaacaatcttgagctctgtggctcctcaccctgtctgcatggaagaccttgctggacgctctcgggagagcagacatagcaccagaagccactgggagaagtgttttcgatccgtgtctgggccacagtagtattcactgtttagtctttgagttccgtaagcagtctcttcatacatttcttacagtctggagtgtactgactaaatctgtgtaagcaaattgaaatactctttcttttaggtagcgtcacagtggttttttttttcctcaggataatttctatacaatttccttactgtcagagggaccagatctttccctcactgtggcaggggccgtgcaggtggataaaggaagagctggtttccggagagtgactgtaacagcgttgactcgaagctagagatggagggggtggccgtctcttagacattggacacctctcagagcctcctgagggcttctttgtcttctagaatctctaccggtggtcctcctgcaggttctggctcacagacatcatcatgcctttttttccctccctgaggcgccttggcagaagagcgtgaccctgtgagccaggccccccttagctctgcttcagatcacagaacacagacagactcgcgagttgctggacctctttggtattaagtgtttgaatccatggtgggccttttgcaagtagcgttagctctttttaaatgttgaactgagctaaggatgcactttcttgtggacatagaaggggcccacgtaaggccctgagtaggctccttagttgctgctttacctgatgagggccaaagagattaactctgcctcgttgccatgtctcagaaaagttgccatatttcacccagaaggggcttgttttcctcttactcttactttaaccatgtgcctggaggagccattctgggctcttgcacttgcccagcctttctttgccaggggcagagaagggaaagggggtagattgagtgtgccaagggccgtgcaagggcaggcttgctttccacccatctgctgagggagccctctcctctcgctccttgcctctgttcacacctgttgtcttggaagaggatggtccctttgtcttaaggctttgtgataaagtcatctccagttaggatctgcacctgtttccttcgtaatagtgcctggcggcctttctgaagttacaggtggttgggagccctctcgcatgcagaacatctggtagattgatctgccaggctgggtggttctactgctttctcaatttctaagaaccttttttttttcttaaagagttctgctgaattatttgacaatatttgtaagtaccatgtttccttgtggtgtatgctctgttctggtttctgttttcaaatcaaatgcctgtttgggaggagatgaacgtatttagtctattagatttgcactgctggattttttttttaaagtgtaaccttgaatagctgtcttattgtttatcctgtaagattagtcaatcgattaaagtttgataattaa

SEQ ID NO: 198 - DNA, 2184 bp, Homo sapiens
agcggggctgggattgcggaagccctccacagttcataaccgttggctggttatgaaccgttcataacgggcgttaataaccataccctgttagactaagcatggtccacccgcgaatcctctacagagatggccaagcgctggggtcgtggctgcgtcctctaggccaggccttggtgggcagctgttgacatgtccagaaccccaggaagtgctgaaggtacctgcagttcaggccccatggaagcccagacctccttcacccttcggggacactgaaattggccaaatgtttaggccatgaggatggctgctgagtaagccgataatccttacatcggacacaaccttgtgcaaaggaccttctcaccacagatcagccagaccatcttcctccttccaagtcatcaaagagttccaagctggtcacctgtcccttgatgttcccaggaaaccaggaaagaggacccctgcattttatcttcccatccagagtggcaggatctctgcctgggaaacaggcttcattcagcacagctgtggtagcattaacaaagcaaagtgggcacatgtagaagttgaagctaaaacattcaagaactccagtctgtttctgtggatgttaagggggtgaagataaaacaatggaggtgatgaggaggaataacttgaagacagtttaaagccacagtgatacaaagaatgaagagaaggaaggtgctggattttactaagaaaacagactgagttcaggagtctcaccagtagaactttatagtattgcgtttcgattacatgtgtgtgaattttaaaaactgattaccctccagtaaaaatgtggaaccaatttgcatttggattaaaacattaggtttggggacaaaagtggaccccatgctgcctgagatgaagagagagagcaggatggcagaggaatcaccagctcaagaaaccccaagacttggacagtcttccagcagaagaggccagggtctctcagtgtactactccaaacaggcctctcctagagatgtagtctgggaaggtccaaaacccaccagacaggcacatccagtggggaaaagacttcccattccagtgtggcctgcatccctcacctctgcttcccagtcttctgctgacctcagaggagcagggtggccattgctgatctgggttagggagatgccagaaacacacccaggtttgaaccacaggttagtggtacaaagtcacagtccttgtgccttcagaaaacccagaggccccaaatacgagtgggaagagagttgggaaaaactgaaccagactcttccaatggccattaaagagaaaattcagcaacgcttgcctttgtctttgaccctgagaagttaagggacacagattgtggcgccgtgatggaacatggagggaaggcatggtgtgcttcctgcagagatgcctctggagtccctgtggccacgggatctcactggacccctcttcaggcaccttgatggggctcagtggggccaggccgaagggtggaagtagaaaagcatcaacaggctgtccagatcaattggcaccatccaagaccctgctgcacccacacatggaggtcaccagctcagccccaggggttctttcacacacaagctccttccctaaggagtcctgtggggttccacactcagtgtgctgcccaagtcagagatttaccacagatctgtctccccctcaacctggactcaagttactgtggtgagaaacctcactgtccatggttaactgaagaaatccctccttcagaaagaacttgagtagtagatgaggtggttagacaggatctttttccctcaagctgtttggacgccacagccaggaccaactctgacagctgcgagagagagagcccctccaatgtggaacctcctacacagccccccttttgggtccctggatatgagcccccagcaggaccaccactctagggggaagtctccctcccatccctcagatccccacattgttcctcctgtaggagaaaagtcagccctgcccctggagcttctccaagatggcactggactcgccgttatcttgaggagccaggagctgaaatggctccggcttagcaacccagtatggccaaagtggaaaggttctctgtcctttgcagtcaccaaaaaaaaaaaaaaa

SEQ ID NO: 199 - DNA, 6501 bp, Homo sapiens
gtattctgaggatgttgtttgctttgggctaagaaaagaaaaaatacaactacagacaaagcctttatatctgcaagtattatggcgtggtcggtagcaatgtaattagatttacatcagtcttcctggtgagacttggaggctcttcctcggtagacatgagtgacccaaggcagtcacaagaagagaagcacaagctaggcagagcctcttcaaagttcaaggatccccctagaatcatgcagtcagatgattattttgctcggaaatttaaagccattaatggcaacatgggacccactacttctttaaatgcctcgaattccaatgagactggcggtggtggtccggctaatggtaccccagctgtgcccaagatgggtgtgagagcaagggtgtctgaatggcctcctaaaaaggactgttccaaggagctaacatgcaaggcactgtgggaaagccggtctcagaccagttatgaaagcatcacttctgtcctgcagaatgggcagagtgaccagagtgaaggtcagcaagatgaacagctcgatctggacttcgtggaggccaagtacacaatcggagacatctttgtccattccccccaaagaggacttcaccccataagacagaggagcaatagtgatgtcactatcagtgacattgatgccgaagatgtcttagaccaaaatgcagtcaaccccaacaccggggctgccctgcacagggagtatggaagtacttcatccatcgacaggcaaggcttatctggtgaaaacttttttgctatgctcagagggtaccgagtagaaaattatgaccacaaagcaatggtcccttttgggttccctgaatttttccgctgtgaccctgcaatctctccgagccttcatgcagcagcacagatttctaggggagaatttgtccgcatctcaggattagattatgtggacagtgccctcctgatggggagagacagggacaagcctttcaaacggaggttgaaatcagagtcggtggaaacatctctcttccgaaagcttcgaactgttaaaagtgagcacgaaactttcaagttcacgtctgagctggaggagagccgactggagaggggcattcgcccttggaattgtcagcgatgttttgcacattatgatgtccagagcattttgtttaatatcaacgaagccatggctacgagggctaatgtggggaaaaggaaaaacataaccactggggcatctgcagcatcccagactcagatgcctacgggccagacaggcaactgtgagtcccctttagggagcaaggaggacctcaactccaaagagaacctggatgccgatgagggtgatgggaaaagtaacgacctcgtccttagttgtccttactttagaaatgagactggaggggaaggcgacaggcggattgcgctctctcgagccaactcatcctctttcagttctggggaaagctgctctttcgaatcgtcactcagctctcactgcacaaatgcaggtgtctccgtcttggaagtgcccagagaaaaccagcctattcacagggagaaagtgaagcgctacatcatagaacacattgaccttggggcctattattaccgcaaattcttctatgggaaagagcaccaaaactactttggaatagatgaaaaccttggtccagtagcagtcagcatccggagagagaaggtggaagatgccaaggagaaagaaggatcccagttcaactacagggtggctttcaggacaagtgagcttacaacactgagaggagcaattttagaagatgctataccctctactgctaggcatggtaccgcacgaggactacctctcaaagaagttttggaatacgtcattccagagctgagcattcagtgtttgcgacaggcttccaactcacccaaggtctcagagcagctgctcaagcttgatgaacaagggctgagctttcagcacaagatcgggatcctttattgcaaagcaggccagagcacagaggaagagatgtataacaatgagacggcgggaccagcttttgaagaattccttgatcttctgggccagagagtccgactgaaaggatttagtaaatatcgagctcagctagacaataagactgattccacgggcacgcactctctctataccacatacaaagactacgaactcatgttccacgtgtcaaccctgcttccctacatgcccaacaacagacaacagctactgaggaaaaggcacataggaaatgacatcgtcaccatcgtcttccaggagcctggggcacttccttttactccaaaaagcatccggtctcactttcagcatgtctttgtcatagtcaaagtgcataatccatgtaccgaaaatgtgtgttatagtgttggagtttccagatcaaaagatgtgccaccatttggcccaccgattcccaaaggtgtaacttttccaaagtcagccgtgttccgggacttccttttagccaaagtaatcaatgcagaaaatgcagcccataaatcagaaaagtttcgagcaatggccactcgaacgaggcaggagtacttgaaagatctggcggagaactttgtcacaaccgccaccgtggatacctctgtgaagttcagcttcattacgctgggtgcgaagaaaaaggagaaggtaaagccaaggaaggatgcccacttgtttagcattggggccatcatgtggcacgtgatagcccgggacttcggccagtctgctgacattgaatgtcttctcgggatctccaatgagttcatcatgttgattgaaaaggattccaagaatgttgtattcaactgttcctgcagggatgtgattgggtggacatctggattagtgagtatcaaagtgttttacgaaagaggagaatgtgtcctcctgtcctcggtagacaactgtgctgaagacatcagggaaattgttcagcgattagtaatagtgacgagaggctgcgagactgtggaaatgaccctgaggaggaacgggctgggccagcttggcttccatgtgaattttgaaggaattgtcgcagatgtggaaccttttggctttgcctggaaggctggccttcgccaagggagccgcctcgtggagatctgcaaagtagccgtggccactctgacccacgagcagatgatcgacctgctccgtacttctgtgactgtgaaggtggtcatcatccagccccatgatgacggctcgccccgaagagggtgttcagagctctgccggatccctatggtggaatataaactcgacagcgagggcaccccctgcgagtataaaacccccttcaggaggaacaccacgtggcaccgggtgcccactcctgccctgcagcccctctctagagcttcccccatccccggcacgcccgaccggctgccgtgccaacagctgctccagcaggcccaggctgccattcctcgaagcacctccttcgaccggaagctgcccgatggcacgagaagctcacccagcaaccagtcatcctccagcgaccctggacccggcgggagcggaccctggagaccacaagtgggctacgacgggtgccagtcccctctactgctcgaacaccagggctcaggccctttggaatgtgacggagccagggagagggaagacaccatggaagcaagcaggcacccggaaaccaaatggcatggcccaccttccaaagtcctgggttcctataaagaaagagctctgcagaaagatggaagttgcaaagattcccccaataagctttctcacattggggataaaagttgctccagtcactccagcagcaacacgctctccagcaacacctccagcaacagtgacgacaagcactttgggtctggcgacctgatggaccccgaattactggggctgacctacatcaaaggggcctccaccgacagtggcatcgacacggccccctgcatgcctgccaccatcctcggccctgtgcacctggcaggcagcaggtccctgatccacagccgggccgagcagtgggctgatgctgccgacgtctctgggcctgacgacgagccagccaagttatattctgtgcatggctacgcgtccaccatctccgccggcagtgctgcggaaggcagcatgggcgatctcagtgagatatcctctcattccagtggttctcaccattcaggaagcccttcagctcactgttcaaaaagtagtgggtctctggattcatccaaagtctacatcgtgtctcacagcagcggacaacaggttcccgggtccatgtccaagccctaccacagacaaggggcagtgaacaaatatgtcatcggctggaagaaatcggagggcagcccaccgcccgaggagcctgaagtgactgaatgtcccgggatgtatagtgagatggatgtcatgtccacagcaactcagcatcagacagtggtgggagatgctgttgcagagactcaacatgttctgtctaaagaagattttctgaaattgatgcttcctgacagccccttagtggaggaggggcgaagaaagttttcgttctatgggaacctgtctccaaggaggtcgctttaccgcacgctgtctgacgagagcatctgcagcaacaggagggggtcctcctttggcagttcccggagttccgtgcttgaccaggccctgcccaacgacattctgttcagcaccaccccaccctaccacagcacgctgcctccgcgggcccaccccgcacccagcatggggagcctgagaaatgagttctggttctccgatgggtccttatcagataagtccaagtgcgcagatcctggcctgatgcccctcccggacacagccacagggttagattggacccacctcgtggatgctgcacgggcatttgaaggtcttgactcagatgaagaactggggctgctctgtcaccacacgtcctatctagaccagagggtggcatccttctgcaccctgacagatatgcagcatgggcaggacctggaaggggcccaagagctgcccttatgtgtagatccaggcagtggcaaagagttcatggacacaactggggagcgttctccatcaccactgaccgggaaagtcaatcagctggaattaattcttcgacaactccagaccgaccttcggaaggaaaaacaagacaaggccgttctccaagcagaagtgcagcacctgagacaggacaacatgagactgcaggaggagtcccagaccgcgacagctcagctgcggaaattcacagaatggtttttcaccaccatcgacaaaaaatcttagccaatccgcacctcatcaagggaccactgggaaatgccccttgtccctttgaagtcacaaacatgtggtttttctgtgtgctttcaaccaatcgtagatgtttttgctgttccattctgtgtagcaccattcaccacagcaggatagggagcctcgactctttctcggtaaccacggcagagagcagcgccgatgtgaagatgaatgaatgtaactcctggtgtgaagatgaatgtaaaccctggcgacagttgagacctttttcttttagactctgctaaaacagtgctctggcttgggcttacctcaagagggaagatagttgagttttatttcctgtatatcaggtgacctggtagagatgtaaagcaatttaccatagtttgggctttagtattgtaaaataaacatgagaacaaataatcagacatatactttaatgttaaaggtgctctatttttttggatgtacagtagttttatttccacagccacattaccatagcaataagaaaggaggcatagtacatagttggaaaagctttgtggggggattaaaaaaaaaaaaaagcactgttgtgtttaacactagttcagatgcagttaccttagagacttatttatttgcaggaacaaatggtgcctgaatattaacagtgttctgattaaaaacaaaaaaaagatacatatgccttgtaaatggctcaccgagtggtcagtagtcacttcaactcttagttcacttttgtatagttgctctgctggaaagaaatgagagtgaatctgcttactcactagaacttccctgtgtgctgtgagccagcggaaccacttgtacaatgccagatttgtttatctttgtacagaagctttgatgaagtgtcttgtatttaacacccttatttaagcttatttaaccttaaattgttaattttataaaatttggtttggcctgcactacgatgagggatggaggtagctgcaggctcagaagagactgagcttgcacagatcagaccgagaagcagggtgagagattctaacgactggatgctgctagtaacacattgtttgtattgctttaccatttttaactgttagatttgagatgaacatacattttgcttttttaataaatgtttaaaagaagtccacataagaaaaaaaaaaaaaaa

SEQ ID NO: 200 - DNA, 2566 bp, Homo sapiens
atggaccaagcaacttctctgagccagatgctggggacgcagaggtgaacccagagacatgatcccatctgctcagatcttcatgtcagaacacgctttattacagtctcggcaagggggtggctccatctgggccgcatctccaggactcctggcctggacttctctttggacctcgggtgaccttggattctggccacagtgacttagcggtcagactccggtggttttctagcccgctgggtgactccctgaagatctcatcctcttcacacctgttgggatggagcctcccatggataggaactcttcctggttgatgctcagcagatgactgatctggctctggaggacagctccaggggtatgagggaggcctggcagcccactactccctcctcacctgctcgggccctgcctgctgggccctattgtctgggtctgggggccctttcctgccccatgtgaacttgattcctcctcgcgtttctgccggtgaccagacagagcctggcctgggccaagtccccactgaccacactttccccaaggctgggtctcaaaggaccctacaagatggggacaggaacaaggatgggagtcggggaggggctgtcaggcagagggcagatgcagctcctcgggtgccgctggctggagtcctttgtctccatttgctcagtgcgtaattgtcattttgtgggggacttccttggtggggcttttccatgcttttcctctccctgatggttacaaagaggagacagtcaggatctgggaggagctggagccttccccctgtgctgttgaactctgggaggggcagccagaggggctgagagtgcaccatcctgaaaagagagggtctttaagagataagatttaggctagggaaattcactagaaagagacaggtggccctgggttttttttcctgccatccaaagggaaccagtcttacccaaaggcttaaggggtcaccttagcccagtctcaggacactcttctccaatcagatcgctgcttctagttgcactgctcctggattctgttcttggggaacagaaggtggcaggacaggccccacaatctgcaattccagctccctccagaggggacagtcccagcgtttgcaagagagcagcttgtggcctcccttaggcaagtttaaaagccagatgtcctttttcccagaatgcggagtggtgtgtactattcatcaacttgggctgccacagcaccatgccagactggatggcttaaacatcaggaatttattttctgccagttctggaggctggaaagtccagatcaaggtgttaagacttggtttctggtgaggcctctctccttggcttgcaggtggcaccttctcactatgtcctcacatggccttttctctgtggagagggacagagagcatgagcaggctctggtgtctcctcctcttcttataaagacactaatatcaccattttagggcttaaacctatgacctcatttaaccttaaccccttaaaggtcccatctccaaaaacagtcacatagcaggctactgcttcaacatatgcatttgggggaggggacaccattcagttctcaacagggtggtcaccgcaaacatggaaagtcagagccttctccccttcagaattcccgcccccacccagggatggggaagaggagcagagaggtatgggaagcagacacggagagtggcaggtaccatgctggggtggctcaggagtgcttcggaggacatatggaactggcagggctcagtgcagggaggtggaggccctgggagagccgtgtcctgagaagggcctgggctacaaccctgggcaagttacttcacctctgagcctccgatgctctgtgaaatggaaggaatgtgcttgcctgtcaggtgcagggagaattcagtgagattgtgtgcctagcacagtgcctgactcccagtaggtgctcagcaaatgctcccatccatctgggagtatagacttagggtttatctatttttttttttttttttggctctctggactttaaaactcagcatcttctgaaccagaggcatttctgattagcccttccctacctattttcctagtatcactctttaatcagcttggggaggtggcagcatttcatggcctccgtagtaactcacaatgcttcctggggtatttaaattctactctctcatcagcactgagcacctactttgggccctttcccgtgctagccatttgggggaaatataggtgaagagtggctggggtttgaacctttaggatttcacagccatgctggatgggataaaaccagctcacatggagaatcagagaatgggacagtgccacaaaacagtctactgaggcacaagttctgagtgcctgggaagtggtagagagaccccagagagggctgctgcagtctggaacagcttcctagcaagctgtaccagacagggccttgaaggatgagaaagatctggctgagatgatacccgaccctctagggaaattcttaaagtaacttctaggaaatgtcattgctcctt

SEQ ID NO: 201 - DNA, 1549 bp, Homo sapiens
gcagcctggaagtcactcgggccaccggagctggcggcgtctccagcgagcggcgcggagctggacgccgcgatcgtggggcccgcgaggcgggcagccggggcgtccagatgcacagtctctgacatcagctctcctgggaccctccaagagcactagtgtctagaaggcactaaggcatggcgaggacaacatccttgctgcctccagctggcgggcgaccacagctactgcctgctctgcgctactgagccactcggtctggagcccccaggacagcacctgcttcctgaggttgtcctggctcagctgtgcacagcgatggtggagaactggactccacaggctcacaaccttcctgtcaggtttcagggcccagcatccttcatcctgggcctggctgccctgaacaatggctgagggctgggggaccccatagagtgacaccacagcgtacggggccagcagcactccagtgcccgtggactatgaccacctatcgggccatccccagcgatggtgtggacctggcagccagctgtggcgccagggtgggcgatgtcctccctgggccacacacaggggactacgctcccttgggattctgggcccagaatggcagcatgtcccagcctcttggcgagagcccggccaccgccaccgccaccgccaccgccaccacccgccccagccccaccactcccgcaatgcccaagatgggcgtgcgcgcaagggtggccgactggccgcccaagcgggaggccctgagagagcacagcaacccaagcccctcccaggacacagatggcacaaaggccaccaagatggcccattccatgaggagcatacagaacggacagccccccaccagcaccccggcttcctcagggtccaaagccttccaccgactctccaggagaaggtccaaagacgtggagttccaggacgggtggccccggtcccccggcagggccttcctcccccttcggcaccgcagcagcagcgagatcaccctcagcgagtgtgacgcggaggacgcgggggagccgcggggggcccggcacacgggggcgctgcccctcttccgcgagtacgggagcacctcgtccatcgacgtgcagggcatgcccgagcagagcttcttcgacatcctgaacgagttccgcagcgagcagcccgacgcccgagggtgccaggccctcaccgagctcctccgggcagatcctggcccacacctcatggggggcggcggcggagccaagggggactcccacaacgggcagcccgccaaggacagcctcctgccactgcagcccacgaaggagaaggagaaggcccggaagaaacctgcgcggggcctcggcggcggggacacggtggactcgtccatctttcggaagctaaggagcagcaaacccgagggggaggctgggcgttccccgggggaggccgacgagggccggagccccccggaagccagcaggccgtgggtgtgtcagaagagcttcgcccacttcgacgtgcagagcatgctgttcgacctcaacga

SEQ ID NO: 202 - DNA, 3806 bp, Homo sapiens
gctcagcccagctgtggagtagaggtggtaagatccacagaacagatatcctctggtagataagctgacattgatgatactttgaatttaccagctggtgaagcaaacgattaatttgtgattgaactgaaaagcagttgaattgttttgacaccagaggctgaatctaaaccctttacaggaagagcagagcatactatacatttcttagcagatcttcaattctgtttgaacatgatgaagtaaccagggtttagtgagatctaaggccgtgaagtaattcacaaccaagatcttatgaacgcattcagatgtgaggggggcaaatatgttttcaaaaacttagtgtgcaatagagtccattatagaaattaaccactgctatatgttttaagtagttcaatcacctgttgtggttcagtcttgattattgtttattttgttaggtgataagtaggaagatgcacttgttatcccgcactatctcttgttttgttttgttttgtttttaaataatgaacagtgcaatctttgaacttgagtttttaataatgatagcaaagacaatggtgagaacttgaaacagccagcatattttatattgccaaagtacttactgatgactgaccacactgtcttgtgaggaactgggtcccctgcactggatcagagccaaatgcaagccacccatcagttcagaggaagcaggaaaacatcttttgggtggtgcatagaacattgagctcttaaaaacccggagaaaaattaggaatttagaaagtaagtgggaggtagaatattgagtccttttttaaaaaaaagaattgatgtctaaatatgtagtctgaacttaagtgtcctaaaaccttgttttttgtttttttgttttttgaggagtcgtcttgctctatcaccaggtgggagtgcagtggcacaatctcggctcactgtaacctctgcctcctgcctcccgggtccaagcaattcccctgcctcagtctcccaagtaggtgggactacaggcgcacaccaccatgcccagctaacttttgtatttttagtagagacggggtttcaccatgttggccaggatggtctcgatctcttgacctcgtgatccacccatctcggcctcccaaagtgctgggattataggtgtgagccaccgcacccagccaaaccttgatttttttagccacctctgggattgcctgggttccctttggagaagaaactaaaagttatggccatagaaaaagccctggtaagaaaatatttgaatggtgtaagatggtggaaggaaagccatcccacacccctacaacatatgttctggcatttataaactgcttgattgtgtgcctcaaggggagaaaaagtcaagcaatgcttcaaaggccaggctttctaagcaaatgagtggttcaaagcagtgtttggctcaagggcagtctggttttatggatagggccgacccaagacatctgctcatgaagaaatgtggcatctgttgccatttcctaaactataaggtttagatagattgtcttgaattttgatagcaaatttttttaaatttatatttctgcctcctcgtacatccttatatatggaaaaaaaagtaagagttcctcagatcagagctcagtagctgtgtcaatttgaagttcaatcagtgtagttgtcctggggtgatcgctgactctgctctgtttcatatttcagttgcttgctccaaggagagaatttctgagaacaatgggtgttagcaactttaagttactccccaaacgtttgctggccacattctcatttctaaacatctggatctgggtaaaggtttgaatagatgtagggaacaaaattggtttttccatggtgtagtctaattttgccaaatcacacaagaaagaaagtatatgacgtgtggagtttgcatttcttggatgggacctatcgggtcacccagcccagtcttacagtcataaattcctacctcttagttcctgccaaagggccttcagcctctgtgtgcacacttattgaatgaatgctttgcctaaagtttggccttttgaagaaaaacagcatgtgataatataaaaatatgagagtttaaaaaaaaaaaagatctctgcctctcttctctctgcctcgtcccaccttgctgtctgtctcattgtctttctctcccctcaccatgcgctgaattcagatttctctttcttttattataggcatgttgttttgaatgtggactttgtgggagggagaggattgttctgagaacagaaactggaagatacgtctgagttgatgggaccaacagggctttgctcctctgtgagggccaaagccattgatacttgtcgggggtgatgagggctttagcatctcaaggcagacatatgaagtatttactgctaaactatattacttactagtacaaatctgttggaattcaggggcagtctaagatttggtgagtgaaatgccatctggcaaaatcgagaagagagtgtggcctgagaggggaatgttcagcctcactgtcacattaagggtacctcaaaatacatggtccttgcagtgtgttccttttccttcctccatttcactttgtcccctcttcttcctttctctcccattttcctggctttttagcactcagcttttttttataagtatgtatttactttttattatatatttggtcctttgggactttgtgatgattaagaatttattccattcaggattttaaaatgatgtgtttaatattttgttctcttaaactcttttgaagctatgctgctaaccaggtataggccagaaaggaggtggcccagtcagtaccttgctcacgtcagctaagggggacagtgatgtcatgtgggtgactcttcttcatttgaccaaggccagcctcctgttcttacctctgcccattcatttctggctatgggaaaactaccacctgttgagtgagccaatgaggccaggaagatcagaggggctgggttccggcccatgggccactatttgaatttctctgtagtaagctctttgtagggctggctccaactgcagtagccaaagaaaacctgtctgactcgacattttaatgcctgagagttggtgaaagttcagctgaagctaatgtctagacatcagcagtaactaggcatccagaaagtagcttcaaccaaagctaatagagcccaagtttccgcaggaagtttggtgctgagctgtccagagcagttgtttatctgagtgttgctagcccttagccatgctttcttagctttattctcgcctgttcctaggcatagcctgaaccagagctatggctcactgctcgctttattctactccctagtgatgcggaacaacatagtctaaaaaggaagatgtggactggggagttaggagacctgatttctattccctatgcttctactaactagcctcgagatcttaaccgctctgtgcctcagtgttcccatctgcaaaatggggatagtgttaattgccctacctacctcacagggttgttgtgaggataaactgagacaatgaattcaaagcaagttgacaagtaagtgctatgcaaattgtaagaaatggaaacaatcatgttaaaagcaatggaatggacattggcagaagggttaatggattgtccagccctttctctgtgtggcttaaacccaggtcgccattgctttatacattttcacttagcacagatttgtaattatgcatgtaataaagcacagccttatccaaaaaaaaaaaaaaaa

SEQ ID NO: 203 - DNA, 11365 bp, Homo sapiens
ggagccgcggggcttccatccttcctttgactgatttttaaattttaatttgtattttccccgccgccccgccccttttcctccgaccccgccctatcgctccccggcttccctgctctttcctttttcccggcttccttcctcgcgtttctttcccctgcgccctcggcttgcctctctccctcctccctcgctctctcccccttctctccccttcttcctcggtttcttccgtcctctctctccccctcctcctcccccgcctcctcctcctgcgctcccgccccctgccccctccccccgtgcctgcagacgcgcggatcgtccatgcgctcctcgcgggcagaatgctgggcagcagcgtcaagagcgtgcagcccgaggtggagctgagcagcggcggcggcgacgagggcgcggacgaaccgcggggcgccggcaggaaggcggcagcggcggacggcagaggcatgctgcccaagcgcgccaaggcgcccggcggcggcggcggcatggccaaggccagcgcggctgagctgaaggtcttcaagtccggcagcgtggacagccgtgtccccggcgggccgcccgcctccaacctgcgcaagcagaagtcactcaccaacctctcttttctcacggactccgagaaaaagctgcagctttatgagcccgaatggagcgacgatatggccaaggcgcccaaaggcttaggcaaggtggggtccaagggccgtgaagctccgctgatgtccaagacgctgtccaagtcggagcactcgctcttccaggccaagggcagcccggcgggcggtgccaagacccccctggctccgctcgcgcccaacctgggaaagccgagccggatccctcgaggaccctatgcggaggtcaagccgctcagcaaggcgcctgaagcggccgtgagcgaagatggcaaatcggacgacgagctgctctccagcaaggccaaggcgcaaaagagctctgggcctgtcccctctgccaagggccaggaggagcgcgccttcctcaaggtggaccccgagctggtggtgaccgtgctgggagacctggagcagctgctcttcagccagatgctggacccagagtcccagagaaagaggacagtgcagaatgtcctggatctccggcagaacctggaagagaccatgtccagcctgcgagggtcccaggtgactcacagctccctggagatgacctgctacgacagcgatgatgccaacccacgcagcgtgtccagcctctccaaccgctcgtcccctctgtcatggcgctatggccagtccagtccgcggctgcaggctggtgacgcgccctctgtgggtgggagctgccgctcggaggggacgcccgcctggtacatgcacggcgaacgggcccactactcccacaccatgcccatgcgcagccccagcaagctcagccatatctcccgcctggagctggtcgaatccctggactcggatgaggtggacctcaagtccggctacatgagcgacagtgacctcatgggcaagaccatgacggaggatgatgacatcactaccggctgggatgaaagcagctccatcagtagtggactcagcgatgcctcagacaatctcagttcagaagaattcaatgccagctcctcactcaactccctcccaagtactcccactgcttctcgcaggaactcaacaatagtgctacgcacagactcagagaagcgctcactggcagaaagtgggctgagctggtttagtgaatcagaggagaaagcccctaaaaaactggagtacgacagtggtagcctgaagatggaacctgggacttctaagtggcggagggagcggcctgagagctgtgatgattcatccaagggtggagaactgaaaaagcccatcagcctgggccaccctggttccctgaagaagggcaagaccccacctgtggctgtaacttcccccatcactcacacagcccagagtgccctcaaagtcgcaggcaaacctgagggcaaagctacagacaagggtaagcttgcagtgaagaatactgggctccaacgctcctcctctgatgctggtcgggaccgcctgagtgatgctaagaagcccccctcgggcattgctcgcccctccacttcgggatcctttggctacaagaagcctcctcctgccacaggcacagccactgtcatgcaaactggtggttcagccactctcagcaagatccagaagtcctcaggcatccctgtcaagccagtaaatgggcgcaagactagcttagatgtttccaacagtgcagagccaggattcctggctcctggagcccgttctaacatccagtaccgcagcctgccccggccagccaagtcaagttctatgagcgtgaccggcgggcggggtggacctcgccctgtgagcagcagcattgaccccagtctcctcagcaccaagcagggaggccttacgccttccagactgaaggagcctaccaaggtagccagtgggcggaccactccagcccctgtcaatcagacagatcgggaaaaggagaaggccaaagccaaggcagtggccttggactcagacaacatctccttgaagagtattggctccccagaaagtactcccaagaaccaagcaagccaccccacagccaccaagctggcagagctgccaccaacccctctcagggccacagcgaagagctttgtcaaaccaccctcactagccaatcttgacaaggtcaactccaacagtctggatctaccatcatccagtgataccacccatgcttcaaaggtcccagatctgcatgctacaagctcagcatctgggggccctctcccttcctgcttcacccccagtccggcacccatcctcaatattaactcagccagcttctcccagggcctggagctaatgagtggtttcagtgtgccaaaagagacccgcatgtaccccaaactctcaggcctgcacaggagcatggagtccctccagatgccaatgagcctccccagtgccttccccagcagtactcccgtccccaccccacctgctccccctgctgctcccacagaagaagagacggaagagctgacttggagtggaagccccagagctgggcaactggacagtaatcagcgggatcggaacactcttcccaagaaagggctcaggtaccagcttcagtcccaggaggagaccaaggagaggcgacattcccataccattggtgggctgcctgaatccgatgaccagtcagagctgccttctccccctgcacttcccatgtctctgagtgcaaagggccaacttaccaacatagtgagtcccactgcggccaccacgccaagaatcacccgctccaacagcatccccacccacgaggcggccttcgagctgtacagcggctcccaaatggggagcaccctgtccctggccgagagacccaagggaatgattcggtcaggatccttccgagaccccacggacgatgttcacggctcagtgctgtccctggcctccagtgcctcctccacctactcctcagctgaggagaggatgcaatctgagcaaatccggaagcttcgtagggaactggaatcatcccaggaaaaagtggccaccttgacgtctcagctttctgccaatgctaatctggtggctgcttttgagcagagcctggtgaatatgacatcccgcctgcgacacctggcagagacggccgaggagaaggacactgagctgctggatttgcgagaaaccatagactttctgaagaaaaagaactctgaggcccaggcagtcattcagggagcccttaatgcctcagaaaccacacccaaagaacttcggatcaagagacaaaactcctcagatagcatctcaagcctcaacagcatcactagccattccagcatcggcagcagcaaggatgctgatgcgaaaaagaagaaaaaaaagagttggcttcgaagttccttcaacaaagcgttcagtataaaaaaggggcccaagtcagcttcctcatactcggatatagaggagattgctacacccgactcttcagccccctcatcccccaaactacagcatggttctacagagactgcttcaccctccatcaagtcctccacctcgtcctccgtgggcactgatgtcaccgagggccctgctcacccagccccccacactaggctgttccatgcaaatgaggaggaggagccagagaagaaggaggtatcggagctgcgctctgagctatgggagaaggaaatgaagcttacagacatccgcttggaggccctcaactctgcccaccaactggatcagcttcgggagaccatgcacaacatgcagttggaggtggacctgctgaaagcagagaatgaccgactgaaggtagccccaggcccctcatcaggctccactccagggcaggtccctggatcatctgcattatcttccccacgccgctccctaggcctggcactcacccattccttcggccccagtcttgcagacacagacctgtcacccatggatggcatcagtacttgtggtccaaaggaggaagtgaccctccgggtggtggtgaggatgcccccgcagcacatcatcaaaggggacttgaagcagcaggaattcttcctgggctgtagcaaggtcagtggaaaagttgactggaagatgctggatgaagctgttttccaagtgttcaaggactatatttctaaaatggacccagcctctaccctgggactaagcactgagtccatccatggctacagcatcagccacgtgaaacgagtgttggatgcagagccccccgagatgcctccttgccgtcgaggtgtcaataacatatcagtctccctcaaaggtctgaaggagaaatgcgtcgacagcctggtgttcgagacgctgatccccaagccgatgatgcagcactacataagcctcctgctgaagcaccggcgcctcgtcctctcgggccccagcggcacgggcaagacctacctgaccaatcgcttggccgagtacctggtggagcgctctggccgtgaggtcacagagggcatcgtcagcaccttcaacatgcaccagcagtcttgcaaggatctgcaactgtatctttccaacctagccaaccagatagaccgggaaacaggaattggggatgtgcccctggtgattctattggatgacctgagtgaagcaggctccatcagtgagttggtcaatggggccctcacctgcaagtatcataaatgtccctatattataggtaccaccaatcagcctgtaaaaatgacacccaaccatggcttgcacttgagcttcaggatgttgaccttctccaacaacgtggagccagccaatggcttcctggttcgttacctgaggaggaagctggtagagtcagacagcgacatcaatgccaacaaggaagagctgcttcgggtgctcgactgggtacccaagctgtggtatcatctccacaccttccttgagaagcacagcacctcagacttcctcatcggcccttgcttctttctgtcgtgtcccattggcattgaggacttccggacctggttcattgacctgtggaacaactctatcattccctatctacaggaaggagccaaggatgggataaaggtccatggacagaaagctgcttgggaggacccagtggaatgggtccgggacacacttccctggccatcagcccaacaagaccaatcaaagctgtaccacctgcccccacccaccgtgggccctcacagcattgcctcacctcccgaggataggacagtcaaagacagcaccccaagttctctggactcagatcctctgatggccatgctgctgaaacttcaagaagctgccaactacattgagtctccagatcgagaaaccatcctggaccccaaccttcaggcaacactttaagggttcggcaatcactgtcacccccggacagcagaacgctggcatcagctatcttagctcctcctctcccctctcctctttcagagcactggctctccagccccaggaggagaacaggagggaggaggagatgaaagaggagggacaggttcttggtgctgtacctttgagaacttcctaggaaggaatggtggggtggcgtttgggaacttgtgccccctaaacacatttactggcctcctctaatgactttggggaaaagatgattctgggtctttcccttgacttcttgtttcaattacaaactcctgggctttctggggaggggttcagaaaacatcaaaacactgcagcagttcctaaatgattctcacaagcaaccctgagagagacagtcttgtgagggagatctgggggaggcaggaagctcctcagattttctcacagacccttcccaattccatcaccactgccaacaactcctcccccagagatctggctggagcccagaaaaagaagcatgtggtttaaaaaatgtttaaatcaatctgtaaaaggtaaaaatgaaaaacaaaaacaagcaaacaaacaaaaaacaatggaaaagatgaagctggagagagaggaaccagttgccaaggtagagagctgcccgctcctgccctctggatgacataggggacatcaacaagacggctgccaacctgagaagtcaccaaaccacaaaaataaccttacagccttcagggaaagactaccagctctgtctttctaccctctaatttaacaatgcataagagtcaataaaccctacttttttatttttggtttttattttgttttcatttttttctcccatttgcctatttatttttttgtttcccttttttttttctttttccgtttttccatttcctcacatgtccacgagatgcttgggttgcttttccaggggctagtttggcttttccaagtgggttttctttggagaatctgatgccatgcaattggcatgacacctgccatgccactatctttggcatccatggggcttatatgagacatgaagcattggctcagaagtagagggagaagaggaacccagttcccttgacttcccttttgagagcacacgttctgctgggtagctcaattgccagcctctgtcatgagaaggtatagccccatcttgatagaagagttactccgagctttatcatggaccagaggaaaaccagaaaactgaaaacattcctctgtcttgtggccagtttggcctttcactgcactattctgatggtgcctgactgaatccaaatatcctagctggctcttactatttttcacaaatgagtattcacatataagagatgaacatccatgtgagatcatcccaatcagaatataagactcaaggagtttgacttggtggccaatacctgccttccaaagagatcctacctttgcagatttgctcctttcccattgccttgaaggtctggcaatccctgttctttcatttgacaagtacttactgagtactcactatatacaaatcattaggttaaaacagacacacacacacacacacacacacacacacacacacacacacacaagacctgggcccttaagtttacagtccagcaggaaatgttaacctccattcagctacgcccccttgttatctagaccttcgggatcatctaagaaatgtagctgaaacccaaggagccagctagaaagaagcttttgattagatgtacaatacattgggggcagaagatctgggatcaattaagatggagcctgaaggactatggaatcttgcttgtcaggaatgggcaagtctacttcctgccatttctgaaagccccgcgggaccagcttctaggctgagctgcctagtaggctgaagcttcaggactctgcaggtcaaggatatgtgatgagcaccggcctaagtgtttgctcttcagattcctaagtagcacaagactttatcagaatctataggcataccaacctggatcactcttccacccaaccgaggagtagatgcatctgaatcttcatatcggtatattaagtccaaaagatggtccgggctgcccctcacaaaagcttctgcatccacgtggtaagctcccatggatgacagggttctgtatgatggagactattattgctattgctgctaattccatgagctgtgaagatccctaaccaactcagctgtaacatatgcaattctgtggtgggaagaggctgtgtgtccaaggatggtgctgaaatcactgccttaaggtctctgctgtgcagaatgaggaggcccccgagctggctgttctaacttagaaggaagagaagactggatgggcctgcttgggatctaggcctcttctaaaccctatcctaagctccagttccatggcaaggctcagacttttaatgccatcttaatctgatggttgagcgcttcactctattttctggtgctgcccagccagtgccttctgccatggatgttactggctacttgagaaaaaggagaggggagaaccccttctttcattccaactgcctccgaccccaaagggattcttggctctctggtaaccatggataccaccatgaattttatttggatcctcagcaggttgattctggaggcctcatgctatgactttttatttctcttcctgggatccaccaccctctactctcagctgactgctgcatttaggccaggtctccaattgctttcctccagaaagtgtgttcccgtctagtgaggtagtattgaagcctcggctttccctctggagcctgggaccctgtttacagttgcacatctgggcccctcactgtggggattgatcattctcatgaaggaatcacagttatatggcaactgcagaaggctgagcctcctcatggtgctataaccccttgggacactcatccagacttctctgaagcagaaaacctgagctccccactcactgccctagaatttatggcaaggagcaaatctacagcattctctcccacctacgtcctgcttcttggttgagactactgggatccttcagaaaagaaacactgggtcccatagctaaattctcaaccgccaggcaccttcagaagaatccagcctaatactggaatttgtgctattatcttcctctccagccccccaactccatccctcaccacagttgtctaggaaatgacatgaattcaatatctaatgtcaaccaatggggagagccacaactccaggagaggttcctgagctgagtcccttaatttctggatgaagaagaccaacaagttttgtccaatgtatttgtttctcagaccttgcctaggcactaaaaataaaatactaggtcattggaggctaatgtgggacctgatgtctgcgtgtgtgtgtgtgtgtgtgtgtgtgtgtgtctccctctctcacacacacaagagcagtttgctgttgctgtttcctaccttctgaggcttcaaagtattttttaaaatctatgctttgtggcagctctacggtgcttatctctgtctttgtgtcaatccttaagtacccatgtctttttcatgtctaaccattgggaaggtagaggctggcagggaagacaaatctgctacaagtccatgggaagaccctacaatgaaatgttcattggttggtatactgttttagtcttgaattgccaactttccaactgatctatccatattccttaagtactaaagacaaaatagagggcttctttttctctcttaatgtcttgccttctggttttcctggtttgcaagactaagtgtacctaatctcaccatctcttcacttctagctctctgaaacaagggtcacactactcagagggataaccccttacagtggtctgaggagtaactatttcctaaagtattctaaaagagtaggaagagagaaatggtagcctgctgcttctcacagacacctcacatcctcacttgggatggcatccacatagaaaccctgcatttaggtaaaatttgcctgactgaaggggactcagtcctccaaatcaaggtcaagaagatatctgcatgagaccttaagaactctttattgccattatttggagagggcgggggaattgtcctaatcacacatttaacacagggaataagtgctgaagtgacccagatcaccaagcgcagttcctcatcatactttatttttgctttccttattccttggcactgactaagctaaagttaagaagccgacttcataagccaacccctgtgatgggatggaaaaatgggcttttgcagagggtttattaatagagatggatatactactcacaagttctggctcatggctccactgagaaggccatagtaataaaatgatcttatgaacactgttccccaaaggccaaagcctgaagatattgccccttataatccaatcagccttatattttaataagtcctgaatcaacctgactacggatatatggggccaccagggtgcatgggtgcatgtctgctcagcctagccctggaagtgagcactgccggccacagatcctgggaaaggtggtagtaacccagaagatgtagccttgaagggaggatacctatcaaaatgccaaagctgcagggacacgaagacggttgaaaattcaacctatgtatactagatccttccagtttgatggtttggtcattcttcttcatgattataccatggagaattttctgtgacaagggtggtcatggaagtaagtgagtgatcccctggtttctcattccttaaagcagtggttcgcaaagtatggcacaagaccagcagcatcagcagcctttgggaacttgttagaaacgaaaattctcaatcccatcccagatctgctgaatcagaaactctaatgagaggacccggcaatccacgttttaataagccctcctggtgattctgatgcacactaaattcaactgttttaaagggaaagccctttatagtattggagttcccacactgagaggctttggggcccaaaataagaaggttctaggttgtcattcagactttaacattaatttcaaagtcacctttctcatgcttccttgtgtttctgtttttccatttatgattttaacaaagaaaggtatgtgtgcttttgggtggaagttaggagaatgtttgtgtctttcctagttgaatacaaccttcagagaaaaaccttatgccttggaaattactacctggcacacaaaggggcttcaacaaggaaaagcagttggaggtctcttccagattgctcttctgccgaattatttgtatctattccgagctgattatgtaataggatggaaaaagt

SEQ ID NO: 204 - DNA, 4078 bp, Homo sapiens
gcgcgccagaccgcccaggaggcggcggctattgttccccgcaggggcccggggcgccctgaaacagggtccacgtcagcccgctcccgagcgtgtcctcaggtctaaggacgggtggggcttcctttgtgtgttctctggaaggggctgggatggcgtcgttgctgccccaaggggtaaccgagggggattgagggaagatggtaccagcgccctagagctcagctcaccagacctactcttccgctcgacccttgcagaggaggtggggacggatatggtatttgtagggcagcgctgtgaacaatggagccatcaaaaaggccttctcccagcctcctcaccaaccacggacattcctggcccaacaagacctcctggccaggttttgagccctgcttcccagatctggggacccttcacctgcctctactactgcaaatgattggatattcgtctgacttggctcttccctaatgtgtggaactaattttgttcactctgtttcatgctggacctggcctgaaaatgggcccttatattgtctttgcactttccaacttgccaagtttctgaaagaaggaccaaagtaatgccaagaactcccagatgaagaggaccttccttagacctataacagattcactacttgacttcagagggaagtttcagctaattctcaggaaaaggtcaaaacaggcctgtgactgtcccttgaatactgaaggtataaacaagcttctggctcctccaggtcaagcagaggaacacttttattagaatgaagggttacttctttgttattcaaacacacacccacacacatcctctgtagtctccctaatgaaaaacctcaacagatggagagcctgagctcccaagtccgcaggctgagaagatgcacttcactcaagggccagtgggctggtacagactagggaagagaaaagggacaaaggctgctagtataggtaatcactatcttttaatactcctaacacatagaaattcgaaaaatcttgttcagcaatgttagcagcctgtgagcctcggaaactaatttggctgatgtgtctctgataaggagcttggggctgcaccaaggggaaacattctcctcctgtattctctcctctctctcgtttgaaagcctgtacaaagaaatggtacaaatggatggttaacttaatgattccatcagaggcagatttttctctgtcaggtccctggataaggtggaggtctgaaagccaggagacagaatatgtacttaatcgccctttctgacctgcttaccagtgaccaggactactctccaggcctttcttctgccacttccccattcttcctggctagttcagttgggtctcagcacttcaactcctggctggatcctgagtttttcttggttgcagggaaagctctcactgtctgcatctccttccccacccccacctcccgttttgcagctggccattctggctgcctcacagctatcctgccttaattcatatttgattgcctggacagaaccacctagaatgtccagacgactgccacccctcagccatgggcctgagatcctgccctgacccctttcttcagaccccaggaggacccacaatctccctgatccccaccttccccaaagtagtctctaggaaaaaagcagagctggctaaggcctgagacagagccatttcttccccttgggcaaacgaggtagaccctcccagagaccaatgccggagaggcccggatccgagctccctttatatggcctcccccatcacggatcccgtgggaaaacctgacacacaatggcgcggctgctccgggcaccctcaacccagcgccctgcggcaaggcctggagcagcctggtggtcttggtgcgctccctttgtcctccccgcaaccctctgcgagcactcgtcccaggagagagaccctggctagggtggaggttgcctcccgcaaagggcgctgttgctggggcctcccctcccccattctcttgtttttctgcttctgagactcgggagggaggcggcaggcgcctccgcagccgatagagcagctattgtgaccttcccttgcagagcgggaacccagccgagtgtgtaccgccggcggtggcgggggaggaggcgactgtgtgtgcaaacctcagtcggagagggggtggcgctgggaaataaaggtttgcaacctcaggcagttgggcccttcagagggcgtttggttgtgtttagactcggttgctttctaacactaattgcaggctcaaaaggagcggaatttattgcgaaggccaaggcggcttgtttataatttatgaagttttaaatggctgtgccgcgggccccaactttctcctgggctggcagccgcgcggaaacgcgccctcccacggctcgccgcccacccccacccacgcccctcagatgagtctcacgccaatggcaggaacagatccgagctattagaagtctcgggaacctccagagatgacagaaggtggcagttttggtccaagccctcaccccactcgagaggagggcgtcggggaaagctgtggctgcctggagagggagcccctgatcccacacttccttggagcctgagtgtgagaggaagctaatgtcagccgggctagacaccgtttaaagtctaatccatgaaaccctaagccgcaaatgacacttggggctttgcagacacccgcagactcagcagatactcctgcggtaacacactgtgctggaaaacgcctggagccatgacacattatgtatttttattattatttatggtaggaagaggagatgagggaaaatcgggctgaatctaagcagcctgacaattcagctagttaatatttagccagttaagaaaggtggttgtaatccctgcaaggcagtgagctctcctttgatttctctaatagcttaaaaaataatttcttacaagacaattaggaattctgcctatggatgcaaatttcatagaaaacaatgttaagccttgaaagtgggtaaaatgtgccttcgattgaagtcatttattctgttgatacacttctacaacatatatattttaaacctgctcagataaagtgaaatttagcaaaaggatatcccctcccacccccaaatctaacatgccattttaaaaacagcacaaaggaacaaggaaactaaatattattttgagccatcattacttagtgaaatacaaacatccaaatagaaacgattgttgttccaccagaagattagaagttaaattatttccacacaataggaatttcacttcgtgtcatcggggatgtagtaggagttgcattatttgtcaaaccaaatagagatgcgtgggctgactgctgaaatacaaaagaattgaaccttatctgaaggcgttttctaagtggcccctcccatagaagccgggaagttgtccacccctagcagaagccacattaatatttacaaaatggttataaatccttgaagacatttttgcccattttgtataagaaacaggagtaaacaaggtgtttatacttgttatgtttcattaatgaaatattattactttacatcttggggaatgtttgttttctttagaaatgaactaatgatcactacaaaggaagaattcatgacagcatttcctagagaaaaagcttaggtacgcgtctccaaatgatggtttctttttctacaccttagctttttcatagctcaattcttcttacaacttctcttgtgttttttctttgattgtcagttttctttcaaagtttattttttgttacttaatgcagaaaagtgagctctggtctccccagtgtaaaagtcgattgtgtctagaaagaaggcagtaaaaacagcaaagcaggcgctgctttcaaaaagccctgcccaaatcatcccgcccagaaccttcttaggtttgcatcctcatttccccctcccctaatttcaatagctggaaagtaatcaagtatcccgaggaccaatttatgcactagactccaaataaataaaatatttttttcaaaaaaaaaaaaaaaa

SEQ ID NO: 205 - DNA, 699 bp, Homo sapiens
atagtgatgccgtatccactgagactccggatcctaacagctggaagctaaaaacaggcgccatggagtacacagggagcaaatatatcggggaatatgtagatgggaggatggagggcaaagccaagtacatcctccctaccgaaacaatatatgttggggaaatgaaggatggcatgtttcacggcgagggagccctgtacttccccagcggaagccaatacgacgccatttgggaaaacggattggccataaagggcacatatacgttctcagatgggctgcactatgatgagaaaaactggcattactgcgacggctatgatcggaggttttacacagagatcctcaatggcttgaagcctgcaggtatggctcaactcaccaatatggacccacctagaaaaatccccaagggctattacgattgtggagacggcttctataacccagtcacgagggtagtcaaggactataggaaccgctttctaagaaacgcagatgatgacgagcatgagtggatcacccgtacctgtcgaaagggctaggatgagatcgtgggtcacaggcccgagccgtgaactctgtggctgcctccaccagaggtttccatctgccctactagcattggctgccctgggggacgggctgtagttctagaacctgattttaactcaggaataaagactttctgcggtc

SEQ ID NO: 206 - DNA, 2620 bp, Homo sapiens
cggaagacctgtttaaccaagtcccaggaattcactgcaaccccttgcagggggccatgtacgccttccctcggatcttcattcctgccaaagctgtggaggctgctcaggcccatcaaatggctccagacatgttctactgcatgaagctcctggaggagactggcatctgtgtcgtgcccggcagtggctttgggcagagggaaggcacttaccacttcaggatgactatcctccctccagtggagaagctgaaaacggtgctgcagaaggtgaaagacttccacatcaacttcctggagaagtacgcgtgaggacgcctgagccccagcgggagacctgtccttggctcttcctcccaatgcccgtcaggctgaactcgcctcccccgtgactctgcctcgggcctcgcagaggccgctggtcacttcgtcatcattttgcccctggagacgtctttctttgtgccttgatgttgagagcgcctctcttttgagcaaacaagcattctatatgcaaccagagtagaggggacctgctcagcaggtgtgaccagggttctctgaatctgttattgtttttgcttctggaaagttcatttggggtttacaacaactaggatgtgttgggtgagatgtttcagatctggagaaatgagcaggtgtcgggaaatgtgtgacttaaccgtggtgagggctggaaatccaaactcaccaccatgatctgtgaaataaagcccttagcggtgtgaagcatccggtcctttgaacagaagggcctggaaggcccctggggctgagaaagggtccgcccggtggcctggaggcaggcgccgggagcgcagtagcacgtggactgggcaggatgttgcactagcttggggtagatgctgggggctgcggccacggtcagagggccccactgtgaggcgtgggtgtgagccaggctgcaggaggaactgggcctccgcttcccagcaacgcagccaggcctgagaattctgtgcgcccggcgggctttgggaatgaggggttcccttgaacatgcgtaggctggaaccccgtctgagaggtctccctgaatttcagtgacacatagtgcagcccggcagtgtcccacttccgtggagagagccgctggaatggtgtggacccatcccgcgggtgaccggtgcctgttctcccctgaccgagcctgtgagcacatcgccccctgctggcgacagcggggaaatgagggctgaaaatatcctccccacaagggcaatccccgggacctgccgagcagccaaggccctgtcctttcttgaatggtggcgagctgaatctggtcggtttcctagcttttaggtggtaaaagtgcctggcagcttggctgccgtggaggagtcagtcgtggttggaggttcattgccgtgctttcatgcagagtgttttgccttcatgttagcttccggctcccctcccaggctgcagactctgacctgtggcatcaggcttctcccagtacaggagggtgccatcccccagcatgcggcttctctgccattagcagccctgggcgggccgaccacactcgaggctgcggtgctacgggcttagccctcgcctccctcactgggagcttccccatcctccctgccttccccagtgggaagttagggaagctcaggagcctgggaccccgcatgtcccaaaatgggattggagaagctggagagaaagcagaagaggccgaggagtgaggcagcagcctctatgcttgatttccacaccgggtccgtgcagaggaaacagaaactcccaactgtccttacccaccgacatcacagcccctatgaagaaagtagccacaatctcaaataacaaaagggaatgttctaaaactttttcttccttaaaaaatggagaaaattgcacttgtgcttgctgtgtggtatataaaccaggattagtcccagggtcgtgaggtttctggtgaaaaggttaaatcgtagaagctagtatattttttatatttttgtaacaattgcttttttcatgggggaggcggggttagtatttatagtcctaacaagtccagtaattttttataaatcttcagattataaacagcccctaaaaactttacaacgtttacacagttttttaaaaagagactgtatacacttgatttgctttcaaaataaataaggtcagctagtctaggaggttaacgtcgggtaggaatgctgatcatgataggtttggttttctacagattctgttccggtgcctttcctatccaggcaccacctgagaaagttgtcatttgaggtcgcacttggaagttacatctgtgaagtttctgtcattcgtccagatctgtgtgtgtagcatgtgctgaggaagcacgtgctgggctgtgcctcagacagtgcatcaccgggcacccagaggcttgcctggctattcctgttctggtgtgtgtggagtgttggggaggaacagatgcagatcaacctgtggctgttttcccgtctaggttctcacaggtatctcctgacagaggtacttaacaatggctctgctggaaatttctataaataaaatgtccaaaatggaaaaaaaaaaaaaaaaaa

SEQ ID NO: 207 - DNA, 5802 bp, Homo sapiens
agtgtcctcctaagcctgaggccaccgcgaccgagccgagccaggctaagggaccagtgtctccctgcccccccccccacctccaggagctctggagccttaggaccatggacgctctcaataggaaccaaataggccctggatgccagacccagaccatggtgcagaaaggacccttggacctgatcgagacaggcaaagggctgaaagtgcaaacggacaaaccccacctggtgagcctgggcagtgggcgactcagcacagccatcaccctcctgccgctggaggaagggaggacggtgattggctctgcagccagagacatctcactacagggcccaggcctggctccagagcactgctacatcgagaacctgcggggcaccctcaccctctacccctgtggcaatgcctgcactattgatgggctccctgtccggcagcctacccggctcactcagggctgcatgttgtgcctgggtcagtccaccttccttcgctttaaccacccggctgaagccaagtggatgaaaagcatgattccagcagggggccgagcccctgggcccccctacagccctgttcctgcagaatcagaaagtctggtaaatgggaaccacaccccacagactgcaacacggggaccctctgcctgtgccagccacagttccctggtgagctctattgagaaggacctgcaagagatcatggactcactggtgctagaggagcctggagctgctggcaagaagcctgccgcaacctctccactgtcaccgatggctaatggtgggcgctacctgctgtctcccccaaccagccccggcgccatgtctgtgggctccagctatgagaacacctctccagccttctctccactctcttcaccagccagcagtggaagctgtgccagtcactcacccagtgggcaagagccaggaccttctgtgcccccgctggtacctgcccgttcctccagctaccatctggccctacagcccccacagtcccgcccaagtggtgctcgctccgagagtcctcggctgagcaggaaagggggccatgagaggcctcccagccctggcctccggggtctgctgacagacagccctgcagctactgtcttggcggaggcccggagagccactgagagcccccggctgggtgggcagctgcctgtggtggccatcagcctgagtgaatacccagcttctggtgctctcagtcaacccaccagcattcctggcagccccaagtttcagcctccagtccctgctccccgaaacaagattggcacactccaggaccgccctcccagccctttccgtgagcctccaggcagtgagcgggtgctaacaaccagcccctcacgccaactggtgggccgaacattttcagatgggttagccacccgtaccctgcagcctcctgagagtccccgcctgggccggcggggcctggacagtatgcgagaactaccccccttaagtccatctctgtcccggcgagctctctccccgctgcccacccggaccaccccagatcccaagctaaacagggaagtggcagagagtcctcggccccggcgctgggcagcccatggggcttcaccagaggacttctccctgacgctgggggcacggggccgtaggacacggagcccctcacccacactgggtgagtctctggcaccccacaagggcagcttcagtggcaggctgagcccagcctacagtctgggctctcttactggggcttcaccctgccagagtccctgtgtccagaggaagctctccagcggggacttgcgggtgcctgtcacaagggagcggaaaaatagcatcacagagatcagtgacaatgaggacgacctcctggagtaccaccggcgacagcgccaagagcggctccgggagcaggagatggagaggctggaacgccagcgcctggagaccatcctgaacctgtgtgccgaatacagccgggctgatgggggacctgaggctggggagcttcccagcattggggaggccaccgcagcattggcactggcaggccggaggccctcacgaggccttgcaggggcctctgggcggagcagcgaggagcctggcgttgccacccaacgcctatgggagagtatggagcgctcagatgaggaaaatctcaaggaggagtgcagtagcactgagagcacccagcaggagcacgaagatgcacctagcaccaagctccagggagaggtgctagccctggaagaagagcgggctcaggtgctggggcacgtggagcagctcaaggtccgtgtgaaggagctagagcagcagctgcaggagtcagcccgagaggccgaaatggagcgggcactgctgcagggagagagggaggcagagcgggcactgctgcagaaggagcagaaggcagtggatcagctgcaggagaagctggtggccttggagacaggcatccagaaggagagggacaaggaggcagaggccctggagactgagacaaagctctttgaggacttggagttccagcagttggagcgggagagccgcgtggaggaggagcgcgagctggccggccaggggctgctccggagcaaggctgagctgctccgcagcatcgccaagaggaaggagcgcctggccatcctggacagtcaggctgggcagatccgggctcaggccgtgcaggaatcagaacgcctggcccgggacaagaatgcctccttacagctgctgcaaaaggagaaggagaagctgactgtgctggaaaggagataccactcactcacagggggcaggcctttcccgaagaccacatcgaccctcaaagaggtttaccgctccaagatggatggcgaggccaccagcccccttccccggacccgcagcggccccctcccctcctcctctggctcttcctcctcctcctcccagctcagcgtggctaccctggggcgtagcccctccccaaagagcgctctactcacccagaatggcacgggcagccttcctcgcaacctggcagccacactgcaggacatcgagaccaagcgccaactagctctgcagcagaagggtgagtgactgccccgccagcccacctgctctcctgaggggaccctgggtagttgccatgcctcctctatgctcacacctttcacaggatgtttttcctttaattgggatctaggcaagaccagaaaggatttagagtgggtacctaaagaagagcttcctggatatttatctaaagccttcagggcaggagactaagggcttagggggctgtgacatctttcctagagagcctagccaataagggaactgcttgttgacctgagtcgggttagacattgccctctctggagggaggggatggatttgatgacttctagaaatggttgcctgagatattggctctggggacccaggagtccttgttgcttgtgtgcaatttggttgttttgaaagcccatgtctgtgcctctctctcctcttaccccctctgtgtctctaccgtaccctctgcctggggtcccccacgccagtcgagtcgcttcccgccgagcccctcccaaccgacgacccagcaggacaacaagtgattgaagagcagcggcggcgactggctgagctgaagcagaaagcggcagctgaggcacagtgccagtgggatgcccttcacggggcagcacccttcccagcgggcccctcgggcttcccccctctcatgcaccactctatcctacaccacctgcctgcggggcgggagcgtggggaggagggtgagcacgcctatgatacgctgagtctggagagctctgacagcatggagaccagcatctccaccgggggcaactcggcctgctcccctgacaacatgtccagcgcgagtggtctggacatggggaagatcgaggagatggagaagatgctgaaagaggctcatgcagagaagaaccggctcatggagtcgagggagcgggagatggagctgcggcggcaggccctggaggaggagcggcggaggcgtgagcaggtagaacggaggctgcagagtgagagtgcccggagacagcagctggtcgagaaggaggtcaagatgcgggagaaacaattttcccaggcacgacccctgacccgctacctgccaatccggaaggaggactttgacctgaagacacatattgagtcatcgggccatggtgttgatacctgcctgcacgtggtgctcagcagcaaggtctgccgtggctacttggtcaagatgggcggcaagattaaatcatggaagaagcgctggtttgtcttcgaccggctcaagcgcaccctttcctattatgtggacaagcatgagacgaagctgaagggagtcatctatttccaggccattgaggaagtgtactacgaccacctgcgcagtgcagccaagagcccgaacccagccctcaccttctacgtaaagacccatgaccggctgtactacatggtggccccatctgcagaggccatgcgtatctggatggatgtcattgtcacaggggctgagggctacactcagttcatgaactaactgccgtgggcctcctggcagagcacaactggggcttttgtataagaagactttaatattctgtaaggagcttggtcctgtgagtttctgggctctggcctcctgaagaaccagccagaagaagaaaagtagaggtggctttgctgcctcctgggagcccagaacttgcagtaaccctttagggtcctgccccaggcccagccagggctgaggagctgtcacagagagggcctcagctctgacctgacacctgctctccccagcctgttttctcttttctaaaagacaaattatggtaccataagctgccaaagatcccctcctgcctcagacccctttgccaggggctttgggggctgagcagagccacatccagagtggggtaatagctcaggcggcccgcttcccatttctcaaaccccgctctgccccattgttctcctttcccttatactttttattaccttgctcaagggccagagatctcaagtgtcaaccttgaggtcccagctccatcccctagttgcagactcatcaccatggttaccatagtgactgcttcattgccatggttacatactaattgctgcagctctgtggcccagcccactgcttcagctgtgggccatctgagggtacgtgccatcatctctccagcccaggcccctgggcatctcatgctggggggaagggactgaatacctttttccttccccctgcctgtgtcttcagccctgatgcacaggctgccagccccccagtccagccctctcccttccactggtgccttgcttagagccagaagggatgaagccgggggatctatggaacagaggaggagcgatgcagttgggagaggaagctagaagggttatggttggagttctgtacagtgttgagtttccgacagggaaagaggattcctccaatgctcctagagagaaagcctgagcaggagatgatgcagcagaggggaagggccctgtggtgccgccgcccttccttcagcctccgaagggtgatggaaatggagagtggaggaccaggcctccagctgtctggcctcgcccttcacgccttaacactaagcccacctcccctgctctccttcccagcattgagcccttggttgcctgggcccaggctgggggttttcagtatttgtaagcatttcagcagaacaataaagcctttggactacgaaaaaaaaaaaaaaaa

SEQ ID NO: 208 - DNA, 2070 bp, Homo sapiens
gggcggcgggcgccggggctggcatggcgtggccctgtatcagccgcctgtgctgcctggcgcggcgctggaaccagctggaccgctccgacgtggcggtgccgctcactctgcacggctactcggacctcgacagcgaggagccgggcacgggcggcgccgcctcgcgcaggggccagcctcccgcgggcgcccgggattccggccgggacgtgccgctcactcagtaccagcgggacttcggcttgtggaccacgcccgccgggcccaaggatccgccgccggggcgcggaccgggggcgggcggccgcaggggcaaatcctccgcgcagtcctccgcgccacctgcgcccggcgcccgcggggtctacgtgctgcccatcggcgacgcggacgcggctgcagcagtgaccacgtcgtacagacaggaattccaggcttggactggagtgaagccctcaagatccacaaagacaaaaccagcccgagtcatcacaacccacacttcgggatgggacagcagccctggggccggcttccaggtcccagaggtgaggaagaagttcactcctaacccctccgccatctttcaggcctcagctccccggattctcaacgtgtgactgcctgcaccgtgacaccatggctgccgacaggacagggctggggagcggcctcaggacccactgccgcggggctgggcgagagcatggcatgggcccctgcgggagggcacagcccctctcaaagctgtcaccagggccaaagtgctggtgtggagcagatgcaccgatggacttggcacacccagctcagcctcaagcatcctcttgagaagcctgtggaaggctcctgcgttcgttaactgccatctggccgtctctcagttttgaaatctctgaggagcctgaggatcaagtcagttgggaaccgaattggtccatggaagctgaggaatgtggacacatccggcccttgaaagaaccagttatgtccacttttggtggatttcccaggatgcgtgagcacttgattaatttcataacctacagtgagacccttggctcttcctacaaatggcccctgcagttgaagctgttggaatcttgggccgtcacctgcatgactcatggtgatgctgagtatccaggaggaaatttccagaagaaacagaccgtcagtcacgggcttccacttcacagacctccttatggccaagatgagcctcatgttttaacaaaacagttcttgggattgaatgactcacatttaccttgtgctaggttctaaagattgaatccacattttgttactaatgattttcccgctaacataaggatgatgagcagggcactatcatacacactggctgagaactggaactgtttttgggaaggtggcatttgtctcattccctgaaataccttaaaatgtcctctacaccaacccttccgtctaccctgctcacatgtacagtgacggggaactcaccaccttttgaagaggcagttcattttctttgcaaagctctctcctaacttcctccgtaaattccagccagcatggccacatgggtcacgcctggtgccttcacacgtttgaggggtcttcgtctctttttaaagcttagaggtacaagctcaggacagtcttcagtaaggaaatttgtggatttccctttggatctttcttcctctccagcccacaagtggctctagtgagacgagcatttaagctgcaggtggtggcactcgggtctcagagccaccagacgtgcaggtgggacagtggttccagctccgactgcctgtcagcgtccctcccaggtgctagccctggcaggcacagccctcccctcatgccagcaaaggaaatgctcttgatgagaggctcgctttaaagaagcccaaagcgtgtgcttatccaaggggttcagctattcctgacttcacggcttgcatgtttgatttttctaagagaaaagaggctgcctgctgggtgtctgtggaaatgagattaaaaactgtacaatctcagattttactaaaatgcaaaaaaaaaaaaaaaaaa

SEQ ID NO: 209 - DNA, 1280 bp, Homo sapiens
tcgagagttgggttcagtcctggcccgttgtggggacggcacgcgggggaaggggaggggacggagaccgaagaacggaggtccttatgtttcttttctttccttaaatcttgcccggcctgaagaggccggaagttgcatctctggacaagtaaactctgagacctgggaatggcgggcgggacccgctcctcccttggggtctagaggagacccccggagatggtccctgatgagcagcgtgatggtggaaagctggactggtctcccgaaaggcgaagccgaggcttcttcctctgaacttttgggccagctgaggggcccacggacatagggcacccacaataggcgtgtgtctgctgtgtgtttgtgttcggccgtcctgcttctctgcttccacacgtacacatgcccctgtgttactttggttcatcttctgtactctgtcagttttctgctggtcagaacatctgtgactgtgacagagctgtccaggattgcagtggataggaatttcttcacatggctcctggagaagtgaccatcacagttcgcctcatccgttcctttgaacatcgcaatttcaaacctgtagtgtatcacggagtgaatttggaccaaactgtaaaggaatttatcgtatttctaaagcaagatgtccctttaaggaccaacctgccaccaccattcagaaattataaatatgatgcactaaagattattcatcaagcacataaatcaaagacaaatgaacttgtgttgagtttggaagatgacgaaagactcctgctgaaagaagacagcactctgaaagcagctggaatcgccagtgaaactgaaattgcattcttctgtgaagaagattataggaactacaaagctaatcccatttcatcctggtgaaaacatctcgagggcttcctttttgcatacctgtattaagctctttattccactgctgagtttttgaaattgacaaacaaatcttaaaaaattaatcccaggctatactctttgagctaaaatctggttatttctttctcttcaggtctttctttccttctctctttctttttctttgttgttgtaaaataatatattatgagaaaaacatttgatccttttaaagggaaataaattgttattaaaaattaaaaaaaaaaaaaaaaaaaaaaaaaaaaaaaaaaaaaaaaaaaaaaaaaaaaaaaaaaaaaaaaaaaaaaaaaaaaaaaaaaaaaaaaaaaaaaaaaaaaaaaaaaaaaaaaaaaaaaaaaaaaaaa

SEQ ID NO: 210 - DNA, 2144 bp, Homo sapiens
gctgaagacagagcgatggtagttctggaggcctcgctccggggccgacccgaggccacagtgcctccgcggtagaccggacttgggtgacgggctccgggctcccgaggtgaagagcatcgggggctgagggatggaagggtctaagacgtccaacaacagcaccatgcaggtgagcttcgtgtgccagcgctgcagccagcccctgaaactggacacgagtttcaagatcctggaccgtgtcaccatccaggaactcacagctccattacttaccacagcccaggcgaaaccaggagagacccaggaggaagagactaactcaggagaggagccatttattgaaactcctcgccaggatggtgtctctcgcagattcatccccccagccaggatgatgtccacagaaagtgccaacagcttcactctgattggggaggcatctgatggcggcaccatggagaacctcagccgaagactgaaggtcactggggacctttttgacatcatgtcgggccagacagatgtggatcacccactctgtgaggaatgcacagatactcttttagaccagctggacactcagctcaacgtcactgaaaatgagtgtcagaactacaaacgctgtttggagatcttagagcaaatgaatgaggatgacagtgaacagttacagatggagctaaaggagctggcactagaggaggagaggctgatccaggagctggaagacgtggaaaagaaccgcaagatagtggcagaaaatctcgagaaggtccaggctgaggctgagagactggatcaggaggaagctcagtatcagagagaatacagtgaatttaaacgacagcagctggagctggatgatgagctgaagagtgttgaaaaccagatgcgttatgcccagacgcagctggataagctgaagaaaaccaacgtctttaatgcaaccttccacatctggcacagtggacagtttggcacaatcaataacttcaggctgggtcgcctgcccagtgttcccgtggaatggaatgagattaatgctgcttggggccagactgtgttgctgctccatgctctggccaataagatgggtctgaaatttcagagataccgacttgttccttacggaaaccattcatatctggagtctctgacagacaaatctaaggagctgccgttatactgttctggggggttgcggtttttctgggacaacaagtttgaccatgcaatggtggctttcctggactgtgtgcagcagttcaaagaagaggttgagaaaggcgagacacgtttttgtcttccctacaggatggatgtggagaaaggcaagattgaagacacaggaggcagtggcggctcctattccatcaaaacccagtttaactctgaggagcagtggacaaaagctctcaagttcatgctgacgaatcttaagtggggtcttgcttgggtgtcctcacaattttataacaaatgacttttttccttagggggaggtttgccttaaaggcttttaattttgttttgtttgcaaacatgttttaaattaaattcgggtaatattaaacagtacatgtttacaataccaaaaaagaaaaaatccacaaaagccactttattttaaaatatcatgtgacagatactttccagagctacaacatgccatctatagttgccagccctggtcagttttgattcttaaccccatggactcctttccctttcttctctgaaaaaaactaatttaaatttgcttttcttttttttaactgagttgaattgagattgatgtgttttcactggatttttatctctctcaacttcctgcacttaacaatatgaaatagaaacttttgtctttactgagatgaggatatgtttgagatgcacagttggataatgtgggaaaatgacatctaagctttacctggtcaccatgtgatgtgatcagatgcttgaaatttaacacttttcacttggttcttatactgaatgccgactctgctctgtgttagagatatgaaatggtgtttgatactgtttgagacattatggagagatttaattatttgtaataaaagatttgctgcagtctgaaaactgaaaaaaaaaaaaaaaaaaaaaaaaaaaaaaaa

SEQ ID NO: 211 - DNA, 3101 bp, Homo sapiens
ttttgccaaatgatttgttgaaaattgcatttttgctattttaatcttgccaaaaaagggggcctcactaatcctaattatgtacatacagaatgatgcacattgcttgcatctttttattcctcccaaagagcatatcaaggatatatatatatacataatttgttagtttaacataaggcgaagagtaccatttggttttaagagtaaatataggctgaatttattcaagaccaaagcaacctatttaatgaggacaaatgagtgaaaccagctgttttagaatttatctgcagacactggagtgctcctttaaacgaagaaacagcctcccatggcagaggaaaagccaggtccttacaaaggcctctcccatcccagtacttcttctgcctgctgctctgccctgggacgtaggccttcctgccgtttctagtcacaggcaccctcctgcctcagggcctttgcacatgccattccttctacctgaacattcttccccagagagccacatggttcacccctcactacctgccagtctttgctccaatgtcacctttcaacgaggccttccctgacttatttaaaaggacaacacaccccaccctccctccctacccacctctctgcatcttcttcttgtgcacctatcaccatctgagtgctgcagatgttaatcattcatccatttatttgattctcgcctccccatctcccatagactgtaagctccatgtgggcaggaacttttatatgtcttgctcattgctgtatcctggtgcctacaacagtgcctgacacatattaggcactggataagtatttattgaaaaaaggaaattaaatcagtaaattgaaaactattaagaggccagaaaatgtcaatttcagctttcatcaaatctaggttctattattgtgagaactttagctgacccagtgacctggctcctatgggtacaagatggttagatacaccgggcagcagcggtggcttctgttcacagacaagtgaatgcctgccctgccgctagccccacctcacaaatatgaggctcactgttcgcaggggagcattttggaaccagctgggatgaagacagttttctgcaggtagcttttgtagccagatgcacagtagtgggttcccatcactccatgaggtcactgtagacctggaccattccagagaatcctttgtaatcagtctttaggtgtctcccagtccttcccagttcaacacgggtggcagcagatggcccagcccagggaaagtccacctgaccattagaaggactcatcctccagccaccaaagcaaggctgcagaggaagaggagcttgtcacaaacattaaccggctcagggctgggtaactgcattgacaaatttggaagcagcagggccagagagccaaggcccccgggtatccccattggccactggtggaggtgcactggaaggtcagggccttgacaccacagagccaagcaacacacacctccttgggcccaggccccagcacagtggccctccagtgctggcaggtggcctcacccacagcaggggaggcgtgggtcctccaatgaccttcctgcccctgccagatgattttcacaactacctaactttggtgtttacttctaggtcctttggccaaatgcgttttcttctaagagttgttggcaaaatactgttacaagcttcttatgggacttttgtcctactgtggcctggttaaaggctttgtcctcctgtttaatccacttccgtggttttgctgtcatttctcttgatgccatattttcaggtccctcgtgggagggggcataaggtctccatcgtgatgccctctctgcagctgtccagccagcagtgagtgggcccacacatgtgcattcctgtgcttgaattgccaaataaacagtgtccctttcattgctgcccaaacagactggaagcctgctcctgccagcactcagggagggagtgtgtgcttcccaagagcctgcccccttggcccatgcaaactttctccatggcaggtgtccgtgaaggtctcccaggccctatgggctgtccagctctttgcacacattcttcccgcttgcaggaatggaatccaaacacctgatacggaatgatgacttggcagtggggagtggggcagcttgtctccactaacttaggaccaaaactaggaaactcaccatgagcatgtgttggagatcagctgtggcctccagcccctgtacacacagaggcaagccccacctctgacagagccagtcaccgttcagtaggagcttgtcttccctgggcccccaggtgggaaaggctgggctcttagtcctacaagtaaaggcgctgttaggagcaaggagcaggcttagctgggtccacagagggactaagctccttagtgacctgttactgcctcatctacggagtttgaactccattcaccatcacctttgagaatttggccttgttttaactaaggattgttgaagttaattataacaagggaccatcctcaccctgtgtttgctttgttccattaaacgtgcgtttggcctaatgaagtcagtgaatgttcctcttttttcttttttggtttctttggctgatttttggatgatatatgttgctttatttctcccattttctttgattactgtggacaaaggaaaacactgaggcaaaagtaggtcgtcaatcacattactttgacccagatgtgcagaacccctttctacctgcaggtgttaattccaattcaatgcaaatatccttttcaatccggtccattcttggagaagaaacccattgtaagagctgtcttctgtggttgggatattactttgtaaagtattaaagcactaaaccagtttttgcaatatgtagtaaatcttgctttcattttggaaaacttccagtaatgactactgcactttttatagaagaattgtatttaatttctttcttttatgaaagattatttcaagtaaaaatagctctgtaatctgtgtgacatggcttctccattacctgacacagagagaagctttgatgcctactcaataaaattaacatgcttgt

SEQ ID NO: 212 - DNA, 22 bp, Artificial
  chemically synthesized
cattgctagacacgtggaaaga

SEQ ID NO: 213 - DNA, 22 bp, Artificial
  chemically synthesized
tctcattgccgtgaatcataag

SEQ ID NO: 214 - DNA, 20 bp, Artificial
  chemically synthesized
aggaaccctcaagctggact

SEQ ID NO: 215 - DNA, 21 bp, Artificial
  chemically synthesized
cattggcaaacaccttgattc

SEQ ID NO: 216 - DNA, 21 bp, Artificial
  chemically synthesized
cttcaaagagtgggctgtgtg

SEQ ID NO: 217 - DNA, 21 bp, Artificial
  chemically synthesized
gaggcattgatgtacgttgtg

SEQ ID NO: 218 - DNA, 23 bp, Artificial
  chemically synthesized
tttggctagtccttgttctttgg

SEQ ID NO: 219 - DNA, 22 bp, Artificial
  chemically synthesized
cggtgtcttcaggttggtattc

SEQ ID NO: 220 - DNA, 21 bp, Artificial
  chemically synthesized
agggtgaagatggagatcctg

SEQ ID NO: 221 - DNA, 21 bp, Artificial
  chemically synthesized
tttcaccttgtcttccctctg

SEQ ID NO: 222 - DNA, 23 bp, Artificial
  chemically synthesized
gcgtacagagatggagaacgaat

SEQ ID NO: 223 - DNA, 23 bp, Artificial
  chemically synthesized
cgagactccagctctaccttgtt

SEQ ID NO: 224 - DNA, 21 bp, Artificial
  chemically synthesized
agaagaccacgagtgaggatg

SEQ ID NO: 225 - DNA, 21 bp, Artificial
  chemically synthesized
ccacgttctgcttcaaaaatg

SEQ ID NO: 226 - DNA, 20 bp, Artificial
  chemically synthesized
tgctagcagcctctctctcc

SEQ ID NO: 227 - DNA, 19 bp, Artificial
  chemically synthesized
tttccagtgacgtgggatg

SEQ ID NO: 228 - DNA, 20 bp, Artificial
  chemically synthesized
actacctgacggccaacttc

SEQ ID NO: 229 - DNA, 19 bp, Artificial
  chemically synthesized
cgcctcattgtccagaaag

SEQ ID NO: 230 - DNA, 21 bp, Artificial
  chemically synthesized
cagactaaaacgctggactgc

SEQ ID NO: 231 - DNA, 20 bp, Artificial
  chemically synthesized
tcttggaggtccaaatccac

SEQ ID NO: 232 - DNA, 20 bp, Artificial
  chemically synthesized
cctgcaccaccaactgctta

SEQ ID NO: 233 - DNA, 22 bp, Artificial
  chemically synthesized
catgagtccttccacgatacca

SEQ ID NO: 234 - DNA, 22 bp, Artificial
  chemically synthesized
tcctatcacctgttcattgtgg

SEQ ID NO: 235 - DNA, 19 bp, Artificial
  chemically synthesized
gcagcaatcttcccgactc

SEQ ID NO: 236 - DNA, 19 bp, Artificial
  chemically synthesized
agggagaagaccagcttcg

SEQ ID NO: 237 - DNA, 19 bp, Artificial
  chemically synthesized
aggatctcgctagccttgg

SEQ ID NO: 238 - DNA, 21 bp, Artificial
  chemically synthesized
ccaaaggatgagcggatttac

SEQ ID NO: 239 - DNA, 20 bp, Artificial
  chemically synthesized
gctgtacgggagcttgtagg

SEQ ID NO: 240 - DNA, 21 bp, Artificial
  chemically synthesized
actgagcgtggctattccttc

SEQ ID NO: 241 - DNA, 22 bp, Artificial
  chemically synthesized
agtggccatctcattttcaaag

SEQ ID NO: 242 - DNA, 23 bp, Artificial
  chemically synthesized
gaaatctcttgtcgaggggaaag

SEQ ID NO: 243 - DNA, 23 bp, Artificial
  chemically synthesized
acacccacctctgcactctaatc

SEQ ID NO: 244 - DNA, 22 bp, Artificial
  chemically synthesized
agtgagcagctgaaggaagagt

SEQ ID NO: 245 - DNA, 23 bp, Artificial
  chemically synthesized
catgtaacgttcctgaattccac

SEQ ID NO: 246 - DNA, 20 bp, Artificial
  chemically synthesized
tacctcaagcacgacctgtg

SEQ ID NO: 247 - DNA, 20 bp, Artificial
  chemically synthesized
gtcagcagcaagttcacgag

SEQ ID NO: 248 - DNA, 22 bp, Artificial
  chemically synthesized
cgcaacttacaagcagctagag

SEQ ID NO: 249 - DNA, 22 bp, Artificial
  chemically synthesized
taatgccagtttttccaaatcc

SEQ ID NO: 250 - DNA, 20 bp, Artificial
  chemically synthesized
ggcttcttcgtggatgagtc

SEQ ID NO: 251 - DNA, 19 bp, Artificial
  chemically synthesized
ccgcaacactgtgtccttc

SEQ ID NO: 252 - DNA, 23 bp, Artificial
  chemically synthesized
caagatcgaggccagtatatgtg

SEQ ID NO: 253 - DNA, 23 bp, Artificial
  chemically synthesized
gcaaacaccttgattctgctatc

SEQ ID NO: 254 - DNA, 20 bp, Artificial
  chemically synthesized
tgaggttctgagggtgaagg

SEQ ID NO: 255 - DNA, 50 bp, Artificial
  chemically synthesized
ggatcctaatacgactcactatagggagattgggatctgacattttctcg

SEQ ID NO: 256 - DNA, 21 bp, Artificial
  chemically synthesized
agaagaccacgagtgaggatg

SEQ ID NO: 257 - DNA, 51 bp, Artificial
  chemically synthesized
ggatcctaatacgactcactatagggagatgaggaggggagataaactgac

SEQ ID NO: 258 - DNA, 20 bp, Artificial
  chemically synthesized
actacctgacggccaacttc

SEQ ID NO: 259 - DNA, 49 bp, Artificial
  chemically synthesized
ggatcctaatacgactcactatagggagattcctcccggtgacactaag

SEQ ID NO: 260 - DNA, 21 bp, Artificial
  chemically synthesized
cagactaaaacgctggactgc

SEQ ID NO: 261 - DNA, 52 bp, Artificial
  chemically synthesized
ggatcctaatacgactcactatagggagatcctttcagtgtatcacagcatc

SEQ ID NO: 262 - DNA, 22 bp, Artificial
  chemically synthesized
tcctatcacctgttcattgtgg

SEQ ID NO: 263 - DNA, 51 bp, Artificial
  chemically synthesized
ggatcctaatacgactcactatagggagatgaaactggttatcaggcaatc

SEQ ID NO: 264 - DNA, 20 bp, Artificial
  chemically synthesized
acggtctggcaaatacaagc

SEQ ID NO: 265 - DNA, 51 bp, Artificial
  chemically synthesized
ggatcctaatacgactcactatagggagaactgatgatgtcatctggaagc

SEQ ID NO: 266 - DNA, 20 bp, Artificial
  chemically synthesized
ggcttcttcgtggatgagtc

SEQ ID NO: 267 - DNA, 49 bp, Artificial
  chemically synthesized
ggatcctaatacgactcactatagggagacacacacacacaccccaaac

SEQ ID NO: 268 - DNA, 6017 bp, Homo sapiens
gggcggggctcgggccggtccgcccgcgcgcaggtgagtgagccagggcggagcgcagctgcgccgggcttgggcgcctggggccgccgctccccaccgtcgttttccccaccgaggccgaggcgtcccggagtcatggccggcctgaactgcggggtctctatcgcactgctaggggttctgctgctgggtgcggcgcgcctgccgcgcggggcagaagcttttgagattgctctgccacgagaaagcaacattacagttctcataaagctggggaccccgactctgctggcaaaaccctgttacatcgtcatttctaaaagacatataaccatgttgtccatcaagtctggagaaagaatagtctttacctttagctgccagagtcctgagaatcactttgtcatagagatccagaaaaatattgactgtatgtcaggcccatgtccttttggggaggttcagcttcagccctcgacatcgttgttgcctaccctcaacagaactttcatctgggatgtcaaagctcataagagcatcggtttagagctgcagttttccatccctcgcctgaggcagatcggtccgggtgagagctgcccagacggagtcactcactccatcagcggccgaatcgatgccaccgtggtcaggatcggaaccttctgcagcaatggcactgtgtcccggatcaagatgcaagaaggagtgaaaatggccttacacctcccatggttccaccccagaaatgtctccggcttcagcattgcaaaccgctcatctataaaacgtctgtgcatcatcgagtctgtgtttgagggtgaaggctcagcaaccctgatgtctgccaactacccagaaggcttccctgaggatgagctcatgacgtggcagtttgtcgttcctgcacacctgcgggccagcgtctccttcctcaacttcaacctctccaactgtgagaggaaggaggagcgggttgaatactacatcccgggctccaccaccaaccccgaggtgttcaagctggaggacaagcagcctgggaacatggcggggaacttcaacctctctctgcaaggctgtgaccaagatgcccaaagtccagggatcctccggctgcagttccaagttttggtccaacatccacaaaatgaaagcaataaaatctacgtggttgacttgagtaatgagcgagccatgtcactcaccatcgagccacggcccgtcaaacagagccgcaagtttgtccctggctgtttcgtgtgtctagaatctcggacctgcagtagcaacctcaccctgacatctggctccaaacacaaaatctccttcctttgtgatgatctgacacgtctgtggatgaatgtggaaaaaaccataagctgcacagaccaccggtactgccaaaggaaatcctactcactccaggtgcccagtgacatcctccacctgcctgtggagctgcatgacttctcctggaagctgctggtgcccaaggacaggctcagcctggtgctggtgccagcccagaagctgcagcagcatacacacgagaagccctgcaacaccagcttcagctacctcgtggccagtgccatacccagccaggacctgtacttcggctccttctgcccgggaggctctatcaagcagatccaggtgaagcagaacatctcggtgacccttcgcacctttgcccccagcttccaacaagaggcctccaggcagggtctgacggtgtcctttataccttatttcaaagaggaaggcgttttcacggtgacccctgacacaaaaagcaaggtctacctgaggacccccaactgggaccggggcctgccatccctcacctctgtgtcctggaacatcagcgtgcccagagaccaggtggcctgcctgactttctttaaggagcggagcggcgtggtctgccagacagggcgcgcattcatgatcatccaggagcagcggacccgggctgaggagatcttcagcctggacgaggatgtgctccccaagccaagcttccaccatcacagcttctgggtcaacatctctaactgcagccccacgagcggcaagcagctagacctgctcttctcggtgacacttaccccaaggactgtggacttgactgtcatcctcatcgcagcggtgggaggtggagtcttactgctgtctgccctcgggctcatcatttgctgtgtgaaaaagaagaaaaagaagacaaacaagggccccgctgtgggtatctacaatgacaacatcaatactgagatgccgaggcagccaaaaaagtttcagaaagggcgaaaggacaatgactcccatgtgtatgcagtcatcgaggacaccatggtatatgggcatctgctacaggattccagcggctccttcctgcagccagaggtggacacctaccggccgttccagggcaccatgggggtctgtcctccctccccacccaccatatgctccagggccccaactgcaaagttggccactgaggagccacctcctcgctcccctcctgagtctgagagtgaaccgtacaccttctcccatcccaacaatggggatgtaagcagcaaggacacagacattcccttactgaacactcaggagcccatggagccagcagaataacttgatccattccagacgctttgctgagtttcataaagcagggcactgagacacccgtccgtgttcctaaccagaaatcctaaagaagaggaattatacagaaggaacagcaggaggttttcctggacaccgccaacttcacattgctcagtggactcattctaagggcaagacattgaaaatgatgaattccaatctggatacagtcatgacagctcatgtgctcctcaacttaggctgtgcggttagccagcctgtaatgagaggagagaggcctgagtcacctagcatagggttgcagcaagccctggattcagagtgttaaacagaggcttgccctcttcaggacaacagttccaattccaaggagcctacctgaggtccctactctcactggggtccccaggatgaaaacgacaatgtgcctttttattattatttatttggtggtcctgtgttatttaagagatcaaatgtataaccacctagctcttttcacctgacttagtaataactcatactaactggtttggatgcctgggttgtgacttctactgaccgctagataaacgtgtgcctgtcccccaggtggtgggaataatttacaatctgtccaaccagaaaagaatgtgtgtgtttgagcagcattgacacatatctgctttgataagagacttcctgattctctaggtcggttcgtggttatcccattgtggaaattcatcttgaatcccattgtcctatagtcctagcaataagagaaatttcctcaagtttccatgtgcggttctcctagctgcagcaatactttgacatttaaagagaaatttagagaatattctcatcctctaaaaatgtttaaatatataccaaacagtggccccctgcattagttttctgttgccactgcaacctattacttggtagcttaaaaacaacacattagcttatagtcctggggatcagaattccaaaatggatgtccctgaatgaaaatcaaggtgtcagcagagctgtgctccttctgaaggctctagggagaagccggttccttgccatttcaagcttctagaggctggctgcattcccaggctccagtggctggtcaagcttttctcacatggcatcactgtgacactggccctcccacttccctctttgacttacaaagcccaccaggaagatccaggataatctctccatctaaagttccttcatcatcctggaagagccttttgccatgcaagacaacatagccacaggtggggattaggaccagaacatctttggggtgctgttattctgcctaccacaccttcctgccactgactcccacaggagaggctacaaaatgatctggcgcacagggatgttttgtttagcttgcggactctaacacttaaaaaaaaacccagatcagaagatctggccatgctggggctcacattctcacctagcaacaactggctggagctgggcaccagctctgcctttagaaggggtgtccacttcaccaggtcaccacagcccacactacgccctatcacttcccacaatgaggctgagtgtttgtttctactgatcaatgcccctgcaggttgcatttattgtaatgaaaaagaaagactgggattaatctctaatcaggtgagtagaccatgagaccaatgtgtgctcacattaccctttttcttttttttctttttctttttctttttttttttaatgtgagacaggatctcattctgttgcctaggctggagtgcagtggcgcaatctcggctcactgcaacctctgcctcctgggctcaagcaattctcccacctcagcctcccaaatagctgggatcactggcacaaaccaccatgcccagctaattttgtattttttgtagagacagggtttcaccatgttgcccaggctggtctcaacctcctgggctcaagcaatcctcctgcctcggcctcccaaagtgctgggattacagatgtgagccaccgcatccagccccacaccctcatttataccaattacctgcccagtaactgtggacttttgcttcctcacccctgctctgatctggaaggagagggattatgttatagcttgtcagcacagtcccaagttcaatatttctgcggcaaaaacttccttcaaaaaataaatgtacttcattgtattcaatgaattcaccttggaaatgcaccgcctcaacttgttcacatggcataaatgaaaggaattttatagtctcctaaatggcgtgtactgcaagacctcttgaacactttccagaggataggatatttaagtcatgcccttggcgttgcctatggcacctttcccttctgaaagtctggttcctgcccagtgacccttggccttgtgagccgagatgctgaccctgcataaagggccaaaggagggctgcggcttccttccctcactgaagagcccttatttgaattcactgtgtggagccctagccctccattctcgacattccccaacctcccagccccttccaagcaggactaggtgccctgcattccacccaaggtgggattggccttccttaggctggctacttgtcaccatcaccgacatcactgttgcctgcaaggacaccacgtggccattttccttcaactgagggctcaaaactcctggacaagttgctggctcctgagaccagtatttcctggagctgtgcctcagtgaaggggcccagcctgaggaaccctggctcttttctttaaagcccaggccccacttacgtaaaacatttcagggtcactggaaacagtgaagtgccatttgttgaagcctactgcatgccagcccactgctcatccacgtggtctgccatgcctacgaggaaggccagcgcatgcaggactggtctctaatgctgtggtcattgcacagaagggaaaggtctcaaggaagagtcaactggaacaagcacaagcccaccggacatggccttggtaaaggttagcagactggtgtgtgtggatctgcagtgcttcactggaaataatttattcattgcagatactttttaggtggcattttattcatttcctgtgctttaaataaacaaatgtaccaaaaaacaagtatcaagctgtttaagtgcttcggctacttgtcccctggttcagtagaggccccggtttcccagttgttgactgtgacaggctcagcatgggctcagcagatgctgtcttaatttgtggatgatacagaaagccaggctttgggatacaagttctttcctcttcatttgatgccgtgcactgtgtgaagcagatgtttttgtccggaaataaaaataatagtcttggagtctcgccaaaaaaaaaaa

SEQ ID NO: 269 - DNA, 3328 bp, Homo sapiens
cactaacgctcttcctagtccccgggccaactcggacagtttgctcatttattgcaacggtcaaggctggcttgtgccagaacggcgcgcgcgcgacgcacgcacacacacggggggaaacttttttaaaaatgaaaggctagaagagctcagcggcggcgcgggccgtgcgcgagggctccggagctgactcgccgaggcaggaaatccctccggtcgcgacgcccggccccgctcggcgcccgcgtgggatggtgcagcgctcgccgccgggcccgagagctgctgcactgaaggccggcgacgatggcagcgcgcccgctgcccgtgtcccccgcccgcgccctcctgctcgccctggccggtgctctgctcgcgccctgcgaggcccgaggggtgagcttatggaaccaaggaagagctgatgaagttgtcagtgcctctgttcggagtggggacctctggatcccagtgaagagcttcgactccaagaatcatccagaagtgctgaatattcgactacaacgggaaagcaaagaactgatcataaatctggaaagaaatgaaggtctcattgccagcagtttcacggaaacccactatctgcaagacggtactgatgtctccctcgctcgaaattacacggtaattctgggtcactgttactaccatggacatgtacggggatattctgattcagcagtcagtctcagcacgtgttctggtctcaggggacttattgtgtttgaaaatgaaagctatgtcttagaaccaatgaaaagtgcaaccaacagatacaaactcttcccagcgaagaagctgaaaagcgtccggggatcatgtggatcacatcacaacacaccaaacctcgctgcaaagaatgtgtttccaccaccctctcagacatgggcaagaaggcataaaagagagaccctcaaggcaactaagtatgtggagctggtgatcgtggcagacaaccgagagtttcagaggcaaggaaaagatctggaaaaagttaagcagcgattaatagagattgctaatcacgttgacaagttttacagaccactgaacattcggatcgtgttggtaggcgtggaagtgtggaatgacatggacaaatgctctgtaagtcaggacccattcaccagcctccatgaatttctggactggaggaagatgaagcttctacctcgcaaatcccatgacaatgcgcagcttgtcagtggggtttatttccaagggaccaccatcggcatggccccaatcatgagcatgtgcacggcagaccagtctgggggaattgtcatggaccattcagacaatccccttggtgcagccgtgaccctggcacatgagctgggccacaatttcgggatgaatcatgacacactggacaggggctgtagctgtcaaatggcggttgagaaaggaggctgcatcatgaacgcttccaccgggtacccatttcccatggtgttcagcagttgcagcaggaaggacttggagaccagcctggagaaaggaatgggggtgtgcctgtttaacctgccggaagtcagggagtctttcgggggccagaagtgtgggaacagatttgtggaagaaggagaggagtgtgactgtggggagccagaggaatgtatgaatcgctgctgcaatgccaccacctgtaccctgaagccggacgctgtgtgcgcacatgggctgtgctgtgaagactgccagctgaagcctgcaggaacagcgtgcagggactccagcaactcctgtgacctcccagagttctgcacaggggccagccctcactgcccagccaacgtgtacctgcacgatgggcactcatgtcaggatgtggacggctactgctacaatggcatctgccagactcacgagcagcagtgtgtcacactctggggaccaggtgctaaacctgcccctgggatctgctttgagagagtcaattctgcaggtgatccttatggcaactgtggcaaagtctcgaagagttcctttgccaaatgcgagatgagagatgctaaatgtggaaaaatccagtgtcaaggaggtgccagccggccagtcattggtaccaatgccgtttccatagaaacaaacatccccctgcagcaaggaggccggattctgtgccgggggacccacgtgtacttgggcgatgacatgccggacccagggcttgtgcttgcaggcacaaagtgtgcagatggaaaaatctgcctgaatcgtcaatgtcaaaatattagtgtctttggggttcacgagtgtgcaatgcagtgccacggcagaggggtgtgcaacaacaggaagaactgccactgcgaggcccactgggcacctcccttctgtgacaagtttggctttggaggaagcacagacagcggccccatccggcaagcagaagcaaggcaggaagctgcagagtccaacagggagcgcggccagggccaggagcccgtgggatcgcaggagcatgcgtctactgcctcactgacactcatctgagccctcccatgacatggagaccgtgaccagtgctgctgcagaggaggtcacgcgtccccaaggcctcctgtgactggcagcattgactctgtggctttgccatcgtttccatgacaacagacacaacacagttctcggggctcaggaggggaagtccagcctaccaggcaggtctgcagaaacagtgcaaggaagggcagcgacttcctggttgagcttctgctaaaacatggacatgcttcagtgctgctcctgagagagtagcaggttaccactctggcaggccccagccctgcagcaaggaggaagaggactcaaaagtctggcctttcactgagcctccacagcagtgggggagaagcaagggttgggcccagtgtcccctttccccagtgacacctccgccttggcagccctgatgactggtctctggctgcaacttaatgctctgatatggcttttagcatttattatatgaaaatagcagggttttagtttttaatttatcagagaccctgccacccattccatctccatccaagcaaactgaatggcattgaaacaaactggagaagaaggtaggagaaagggcggtgaactctggctctttgctgtggacatgcgtgaccagcagtactcaggtttgagggtttgcagaaagccagggaacccacagagtcaccaacccttcatttaacaagtaagaatgttaaaaagtgaaaacaatgtaagagcctaactccatcccccgtggccattactgcataaaaatagagtgcattttgaaataaaaaaaaaaaaaaaa
